United States Patent Application Publication US 2026/0258423 A1 - sequence listing, part 19

SEQ ID NO: 167803 - DNA, 46709983 bp, Homo sapiens (residues 20,018,569-21,686,782 of 46,709,983)
  source 1..46709983: mol_type = genomic DNA
agtagcatttaggagtaaaaatctaggccgggcgcggtgctcatgcccgtaatcccagcactttgggaggccgaggcgggtggatcacgaagtcaggagatccagaccatcctggccaacacggtgaaaccccgcctctactaaaaatacaaaaaattagccgggcgtggtggccgttgcctgttgtcccagctgctctggaggctgaggcaggagaatggcgtgaacccgggaggcggagcttgcagtgagccaagatggcgccactgcactccagcctgggtgacagagccagactccgtttaaaaaaaaaaaaaaacaagaagaaaaaatctgttggaatgttactgcttctagaagcaaacagaactagaaagtatgtttatagcctaacccatgtatatccacatatatgtaattttctatcatctatttccttaatctatccatctacctatctattaaacagaagttcataccaatgtctccgactccagtccaatatcccaagtttcattctagcttccctgatgtataacttgtttctctgatagtgagaaatctagcttccattacctagcatttacttactttttttttttttttttttgagacagtctctctctgtcgcccaggctggagtgcagtggcgcgatcttggctcactgcaagctccgcctcccgggttcaagcgattctcctgcctcagcctcccgagtagctgggactacaggcacctgccaccacgcccggctaattttttgtattttttttagagactgggtttcaccgtgttagccaggatggtctccatctcctgacctcgtgatccgcccacctcggcctcccaaagtgttgagattacaggcgtgagccaccgcgcccagcctacttacttattttttaatcctagtacagaggtaaagtttttccagtattcttaacccatacccttctgagaaacaaattcacagagtacagtatttatatacaactattttattacattttccagtcaaaatactcctatccaaagttacttaagtcagactcttttttgcgcaaccccttagtgagattatatcaggcacttatatcacagattcatttattacagcctacgttctatccagaaatcctctaacatactggtttttaaaatttgtatatattaaagctttacagtatatgatatagagtattttaggttttgaaaagcccatgaagtatctgctgtacaaatgccatacagagcacatcctccttttactgacaacaatctacaaattacattttacttccatctggaattctgtgttctgaacggttctctttgtcaggtaggtatatgttttccctttaagattcagcatagccattgccattttgttgagaatacctgattcaggaacctttagaatctcctccctcaaggctccatatcagctgcctgtattctgagttgatgctttcacgttttccttttgatctctgcacaacaatgctgagggtagaacctagaggaatcacacagctggtgccctttcacgctactgacactggtaacagtttgttcaccagattctctaataataaggcaaaaaccgtgtccacatgacaggtttcctctggttttgccttcctttgtcacgtgatacgcttgtatccttctttaatgatattgcttaatcctgctccttctcccagttccaggccagcgcttctactgaatcattaaatgttgacattcacagttattgtgcccttagtcttcagaaaacataatcacctgagccttctcagctctgcttaaaataaccattccaagagaaaattaataaccaataaaatatgactttattcaaaacttagtgacttgtatattttcagaattaagtacctacagggaaactctatagcacaaatacactaagctcatcattagctaagaagaatttcccctaaattggctcattctgctatatttaccatactgatcaatggaaatgtttattattattattattctcctaagtcagaaaactgggcagtaagttttaaagcaagtacaaattttcagtaattttctgttcaatgatacctcagtatagtccactctctctaacatgctttcaccaataatcatttaataccattgcaattgttaacatattgattatatcaacaatttatagtcatttatccaccagtattcatacttagtaccctgcccagaataaattgcatagatgatgatagtttctctcttgcagccaccctgatttcctttgcctgttgttgcattggtttactcctttggaagaggaagaaacaaactggataaatcaaacacaaaatcacgataactggttcgtttctccttaattccaaaagaacttatttaaatgctgctgttagctttaaaattcattctcctgaaagcatatcctgactaatagttttcccaattaatttttcaaatgctatttaagtatataattcaaagaacaactcattgtgaaaaaaattattttttatagttcataattctaatgatattaaaaatctttatataaatataatatttagcttataacttgtttctgaccagtactagtccagtattaccttagaataacagattatcatattttttacactttttattgaaactctttttcactgtggagaaattatctagtattatacaagtttgataaagatggagtcctttctcataatttaaaagattataaacattgatttattttatgtgtgtgtttgtgtatttggtggcagggtatgcactcgttttgttgttaggaatttttttaactgttcatttagattacttttgaaaatggagatatgatatagggatagtcataatttaaagtttttaaaattattttaaagtttatgaacattaggtgtttaattatgaattttttattatattttaagttctggggtacatgtgcagaatgtgcaggttggttacataggtatacacgtgccatggtggtttgctgcacccaccaacccgtcatctacattaggtatttctcttaatactacccctcccctagccccccgacccccaacaggcccccatgtgtgatgttcccctccctgtgtccatgtgttctcattgttcaactcccacctacaattgagaaattgcggtgttcagttttctgttcctgtgctactttgctgagaatgatggtttccagcttcatccatgtccctgcaaaggacatgaacttatccctttttatggctgcatagtattccatggtgtatatgtgccacattttctttatccagtctatcattaatgggcttttgggttggttccaagtctttgctattgtgaacagtgctgcaatcccattactgggtatatacccaaagaattataaatcattctaccagaaagacacatgcacacgtaggaatttttaattcatttcattagtttttttttaaccttattgatccatttattattatttacaaaagtatccatctgtggaggggtttaatgacttgaaattggagcatggtgcagtagttttacagactaaggattgtatatctagagagaatttccataaaaaattcagagaaaggagaaacacttacatatacaccagagaaggcatgtagagaattttggaaccttccagcagaatgagtcaaggacttaccaacgccaggcagttacattgtaactcaaggggaaaaaggaagtgtgtgccctgaaaggcacgtttctttatttttaatataattcactctttaaaacagctttatgcttacagaaaaattgaagagatggtacagaaggttcccattaccccacatccagtttcccctattattcatattttatattaatatggcatatttgttataattaataaaccgatattgatacattattattaagctcataatttatttatatttcctttgtttttagtgactgtcccttttttgttccagaatcccatctaggatatcatatcacattgagatgtcaagtttcctttggctgttcttggctgtggcagtttctcagacttctgtagtttttggtgagtaacagttttcccaattaatttttcaaatgctatttatgtacatacttcaaagaaaaacccattgtgaaaaaattatctttataattcataattctaatgatattaaaaatctttatataaaaattcagcccatttacatgtcaaggggcttcagagggataattagacataaacctgtggcaattagatggttccatagagcaatacaattttataccttcttctacatggtcttaggcaatatgaagcaatgtaataatttgtgcctaatgagccctttatttattgtgcatttctgttccaatttttttataaaattacaatgttgactttccaaatatattttctttcaatatatgtatgtattttttatttctttctttcgaaatcaacgaatattttgagatatgaagagtcttggagatcaaaattctacttgcctttccttcacaccattttcccataagggacagtttaacatttttgatgttttgtttttaaaaaactgtaggatatagcagttaggagaaaatatacaatgttgtggaattatttctttctaccatgaaaatcgctgtcaggatgacacatagaactcatttgtccatcagcaagcacaaatacattcactgcctggtatgtgccagcagagtaaatacatgaaatgaaaatataaatagatatggcctccttccagggaacaccgctgttctatgattcactcctatgcattccagccacaaataattatttagcacctactctatgctaaactctctgacaggccttaaatatttaaagacttactgtcctcagggagcttgcaactggtaggaaggacagaaactatttcaaatttttatatgtcctatgcaaaaatttgtattggttgctataggtatattgtgggggtagagggactaaatctgctccataagacgtgtttactctgcattcacacctagaactctaacaatactaaaaaaagaccattccctttaaatgcacccatacattaaatctacctgccctttatggttttgtgccagaaattttctgggaataaaaattaaagttgtgtgcttgaattttggccaaggtgtgattttgtgatgcagatggcacactagtgcagtagcctggtgtttatcctattgccatccagaaaaatgagcacagaaagagtacatgaaatctgattagcaagtcttctttttataagcagatgttgtgcctcatataaattattcttttagattttgtaacatatgccaaagtatttatcacagattaactgcatgaacttgcctgctattctcaaactttctgagtgtgaaaatgagtggatgcgtctttcacagttctgatcaaaagatatataagaatgaataattgtaattcagacaagaaaagtacattttgaaagctagtaaaagattatatgcaaaaatgaagcatttcctacttgttctgttattcttttccttattgaaaagcaattgatgctgaaaagttctatttcgaattattatacttcatattaccaatgcaccttaacactaaacgttttaaaagatttgctcaaaatatttctgtatgttcttctcttgcttcggattgtctcacatctttcataaatgaggttcttatttccagatattttctaaaacactgtgtttgaaatcattattttgtattgttgctttgttgaaaattgtccattatgtgattccaaatccaagaaggaatttactcagcaccagataatttgaaacataatagtaaaaaaggggttttaaaaaataaatttctataatttcagtgttttgtgtctcattttaagacatatgggattgtgcgtaagaaaaataaacttcctaggtcataattaatatttttccctcggtattattgatatcaaattcttatcttaaatttggtactttcagaatataagcactaagagatccatacaatttaaaagaggaggtggctattaacacaaatattacttgttttgttgatgtgacttttaagataacttctaatgttttggctctgccagaacagactaatacaaggagaaaaaatattttatattttctcattaatttattctgtagagattctctttatttttaaagaaagtcaaatgcgaaaaaaatcgatgccagaattatattgctttcatataaaccctggatcgagcctggtgaggttatagttaccatggtaacagaagtcggctctttaaacagtttctatcctaactgctcttctacttatactgagcgatttcttcaaatataggactcatgggggtgtagttatgagaaatttcattccccataaggatacatgtccatataatttgtaaggagtaactctggcacacggaggttaattagatataaatgttaccaacataacttttaaaagcactgtattcccccggtacataggcaagtgtaaagaaatgtaaaatgaagtatcccaaaaagggaactcagatgacaccggaactaatataagtatatttcatatttatgaataaatatggaaatatctttcagaaagtgtgaggataagaaaatttattttatatgttgaacttctgcaggttgaaatgggtgcattacttttagtaaattgcttcaaagagacatagcagtgatttttcttttacaatgtttagacacattgaactaaataaggtttaaatctgtatctacacagacacatacacacacatatataattaaagtgataattcttcacacaacatgttcattgtccgccccccaaatttttaaaatattgacagactaactatattacaactttacattttgatatttttattttgttttttctataatttcaagaaaatcttggtttcagctatctctttccatttatacataatgatgctgctgttaagccaccttgctatggctattttccactcctagttttacttgaccagttggttaaacataaaactttcctataaaaaagacaatggatcttgaatcataaatctcttactacctacgtgagttgagacactcaaactttctgatgtttaatttcttaagctccggcactgtgactataatcattgctaacccttttgttttatttttaatatatgtcaactaaaaataaatacgtcagatgtattattgatcagtttcggctgccatagcaaaataccacaaactgaatgacttaaacaacagaaatgtatttcttcgcagttttggaggctggaagtctaatgtcaatcacaaggtgccagctgagttggggtctgatgaggcctgtctttcgggcttatagatggctgccttcttgctctgtgctcccatgcctgtttttctgtgcatgtgtgatgagagagagagagatctctgctatgccttcctcttcttctaaggatacttgttttataagatgaagatcttactctataaccctatgtaacttttattatctccttataggtttatctcaaaatatagtcatattacagtttagggatggagcacacaaaatttggagggacaaaattcagttcataccaacagagttttgcaaactataaattacagaatatatatagatgacagtatttctgtttttcacttattataggaatatcctccttagaaaattactgaaactaactacactataaaatgtaatacactatatacacaactttgtttttaatatatattctgatcaactaaatagactagatctgtttcaacaaagaaaaatagaaacaggtttctttaaatgtctctggcaatagtgctgctttatcattttagaaggatggtatttcccagttaatttttcccttaattattagctgagttatactcagtaattacaatgagttatatcatcagtagttcctgtctcttctggcttaagtgacactcatgtttcacattcaatgcatagtgtggattcacagtcatcatccttttttttttcttttactgagttgtgttacacagtagctcatgaaacagaaagtaatttgtttttaagtatagctagggaagatatgtgtcatagggtataagggagcaaaaacaaattgctacgcggtctctgctttggggctaacactctccatcctgcatcactggagtaaaaagaatggttgccaaggcatcaaagtctggaaggtttccatgataatccttcctcacagaggtaaacttgtcatttagagacacattttaaatgggacgtagaattctacactagataaaaaccagttttaggtataagacttctattttttgtcacccgtctctataaatattttcgaaagaaagaaagaaaagaaggaaagaaagaaagaaagggaggaaaggaagaaagaaaggaaggaagaaaggaagaaagaaagaaagaaagaaagaaagaaagaaagaaagaaagaaagaaagaaagaaagaaaacccaaccatgtatttgtgtagaaatatcaactcggtggagtgacactgttttaaatacctgtgaccttgagaaaatgcctttcttgcccttgagaagtcaatctaaggaggatgcagcaattggcatgacatgagtaacctgccacatgacagaaacttgatgacgataaatgactatggaaaaaattaatttgaggagtaatgaatcatcaaaaactttacatcggaaggcaaagaccgtatccttgtaagtcctttggaaagttatgagtacaagttacaagtataagtgaaccttttggtatgaaatgaataaaaagacataaatgaatgaataaataaaagcatgcaagatagagtttatcttgttttgtcatatcattaatgtctttctagtcaatgttttaattaagaaggaataaattatcatagaacaaaccacatcatttttcttttctaatttttttccatttcatctttttttaaattttttataagtaagctttagtatgtatgaacttgatttcacatacaaacttagaacggcaatttcacttaaaattaactcattaaaaagtataactaccacagtatggatatgtatcactgggccaggggatgctcagatgttttgttaaacattatttctgggtggtctgtgagggggtttgcagaagaaatcagcatttaaattggtgcgctcaataaagtaaatggtccttcccaatgtaggtagacatcattcaatctattgatagtctgaaatagaagaagacgatggagaaaggttgaattctccctctctgcatgacagtatgagctggaaaactgatctttccctgcccttggagctcctggttctcagaccttcagactggaactgtcacagttcccaaactccaaactccaaaaggtagtgaaactggtgacaaatattgctattcatcttttgatggattataacaacagcatttatgaaactggttcccagacaagtatataccactcgctcctgtgccttagggaaaagagatgtcataacaaaggcattattgatgcagtaattcatggacagtttttttctcattaacactgctaaaattacgttcatatttttttactttgtgtgggagctgatgactcctgcccttttgttttttgagggctatctttcaaggtgaggacatcaaacccactcattccgaaatgcatcattatggtttattgaggaacatattaagacatgatagaaagaggcaagaagataaaagcatcctatgaattcaaaactgaaatggaaagaggggaaagttctctttcacattgtaccatgttaacagatcctttatttaaattgtccagcttttggttgtttgtatcattctccgtatgtaacattccaaacacttgggagggttagcctgctctgtatttgtctgcaagcctggcttttcactcagaccatggttgttttatagcatttggtttatgcatttttaaatgtttttggatgtttcattgtttagtcagcaggttggtagcgaaaaaaatagaaaaaaaccatatgctccctgaattgagagagcattttggaagaagtcaaaatagggcaacaatatgttttaaattgatttcaaattataatgtctttggaaaataatataaaacctccccaaagtgagaaatcttatggcaaatttatattttcaaatgaaatgtgactgtaatcatacctttaaaaaataattatttttttttaccaaatgttgtatctacatagactttgttttcatggaataataatcatatcaatctatatgataaaacacattacaggcagtcatttatatggtaatttggtttttaggaccaaaaaaatggtttatatgcaaaaccattttgaccttgaaaaaatagcatcttttgatatattttgtctaaaactttaaaataatattaataaatcactacaattatttttgtgctaaacgtaaatactgaacatccaaacttgataggcatatttaaatattgcaagaattatttatatataaaaactattttaaaaatataaatctaaatatatgtgtgaaataatggcacataatagatattttccagcctggcactttaaccataaatttcttctaaaacaacttagcccatgcatactctaatacagacgtcacatccttttcttacttcttcactataaatgttatatgtaaaatacaaagaaattgtctcttttgattaaattttggccgtatagttgaaatgttgtctctattagcagagagttctgctaaaaacaactatgatatctggcaggtggatgtccagtgataacttttatgcaccaaaactttgatttcaccttgatgtagctctgtggatccagtacaaaaaagaatatcatctttgaacctactagtgaatatttcagttccccagttggaatggaaatattctcagaaatccatctcaattggagccctgaaataattttagaatctgctctcaggatacaccatcttccttaaaatcaaattcctgttagtctctggctatagaattgctctaaactgaacaacataaagtcagtcctagataaatcactggcctttttcatcctaagagcattatccctttaattctggtatctgccaccaggtagcaatattatgagtagattatgaatattcagcatccacactggacatagatatctgaaaaaggtttaaacgacaatttaatcatttaggtattcattcttaaattaatataaaattaagtgactattcttacatcagagttattatcttagtttcaataacctcagcatcttagatactggctaacaacatatagtacacaatccacatcaataattattgaaggaggtaattaacaagattcaaaaaataaaataccccttgaagcaaaatataaggaaataaataatgcaatagttaattttatatatcaacttcactgggccaggggatgctcagatgttttgttaaacattatttctgggtggtctgtgagggggtttgcagaagaaatcaggatttaaattggtgcgctcaataaagtaaatggtccttccccatgtaggtagacatcatttaatctattgatagtctgaaatagaagaagaagatggagaaaggttgaattctctctctctctgcatgacagtatgagctggaaaactgatttttccctgcccttggagctcctggttctcagaccttcagactggaactgtcacaggatgcttggggtgttgcttcgccagctggaaacctctgtagccagtggtgcctttgcccaatttttgcttggcccactgagcttgttccacccactcagcctggcaggctgtgcttggctggcactaccaggttggataacatgcctgccaagggtgagcaagcttgggatctggccactgcgcacagccaggcactctggctgtggtggggcaggcagctccaggctccagcatgggtgctggctcactgcgaggctgcagctggaccaggcgtaccacaagcaacttccacagttggcatcaagggcacacagtggtgcccagaagcatggagatgccaggaaccatagagctacaaagagtgtgtcacagcctggcttgaggagcttctaagtctggcctccccaatgggacccaattgctgttctctccttctgtcttttttttttttttttttttttttgagaagcagtttcactcttgtcacccaggctggaatgcaatggcacaatcttggcttactgcaacctccgcctcctgggttcaagtgattctcctgcctcagcctcccaagtagctgtgattacagggatgtgccaccacacccagctaatttttgtatttttagtagagatgatgtttcaccatgttggccaggctggtctcgaactcctgacctcaggtgttctgccagcctctgcctcccaaagtgctggaattacaggtgtaagccaaggcgcccagcctccccatctgtcttctgttctccttgttgtgtgcaatgtggtgagcaaggggtgtgtttcagcccttttgtgctatagctctttagcctcaccatatagcaggtcccaagttcttgtcctgtgtccaggaagaatgaggtatgcagacaagtggagggtgagcaaggcaaagaggagctttactgagcgacagaacacctcagaggagacccacagtgggtagctcctctctgtaggcagggtgtcccactgaatgttcagctcttagaagagaggagacctggagtgtgtatctcctctccatgggcaggtcatctcaagtgctcagctctcaacagacaggagactctggggtgggtagctcctctcagcagctggttgtcccgttgcctcgctgagtctggctgagtctgggggtttctaagggcttcagaggggagaaagtgtgtgcttattggtccataggtggccatgggtgggcccagaaaaggcaccaccacttcctactccagtctgcagggctggcagcctggtccccaggcttcaggccttccctagcttgaaggtgaggtttcacagggaaactgccccgctctggcctgcagtctgtctgcctcctgacactgttcatggtgcccaggctgttcatgctgaggggtacctgcaggccagtgccaagctgccctcagcatccccctggcttccctcccatgctcgttggcacggaaagtacagagtcagtgctgccccaagcatgtgcacattgggccaggttgtgacagcacccagtctcggcctcaactttgctcagataggagcaggctctgggagtggggagaggccaggcagcaggaacatgcacttctgagccccctgagagtgcagagatgcctgggtctgcagctgtggcttgcgcagctgcagctgcacttgggatgatggggctcctgcctgctcccagctcccaagagcatagggaggcccaggtcaacagctgtagctgggtggctgcagctgtacctggggaacgtgaagttcccaccatgccaattcagaagcgggcagggcttttgcctgtttccagctcccactggctccctgcagcacgcagcaccggctgcacctcctccactgctgccagcgtcatggcagcagctactcaaggtgggtcgtcactgccatcagaactagaatctatgcaatcagctctctgggtcccaggtcttctaactgcaccacaggctttcctgggtcttcagtatttgaactgcacatcatgagacttctcaacttcataactgcatgggcaaattctatataatcaatctcatcatatatacttgtgtgtatatatattctattggttctgtttctgtgaagaatcttgactaatacaaataattttgatattatcaatgttttcttttctatcctttgtttatcctcagcattgcacatttctctattatacctatggctccttttccagaaaggtggcctggcaatttgacttttccacaaaaatggattctatatattccattaaaaattattatcaaatgatgtcataggatcgatgtataatatgtattttcctttgtcataattcacacattggtttgctgattttctcagcttctatttttacaagtattgaactctaattagattactttgatattgtctgatggagttactttggggtattttaaacttagttataaatactccttgttgctttctgctgtacttactctttagttaagttagagataaatattttctttactagaaattttataagtatactaatttaaaatacatatattccaagggattttttgagtgttcatattatatcaatacatttaacaaatattcagagaaaaggtactacatatgatggctcatacatgcatataatgtgtaacgcaaagtaaacatataatatgttttgtaggttttggagaaaaattgttgaggacaatgaatacatacccctacttcatggactaggtgagggggggaatattttaaaagtgcatttggagtgtgtacagaatttagctttagccacaaaaagtatttggtgacacatttgctctctgtctattatgaataaaataaaataaaactgagcaaaatatgaagcaaccaatttcagacaagtaacatagacctgtgctcactgaaaaaacaaaacttgatgatgtgagatgcaggctcacctgggctcctaaaagggtaaggtggagcccaagcatcgtacagtggtctcactgagttctgcaggcataatgggcagttggaagcagcttaatttgctagatttgcataccagcctggagaaaatggagctgagtgagttttgggaggcagaattctgtactagtctcctgttggtccatgtttacattcactctgagacctcacaacacatagcagagagcagctcctatgagatttagaaatgaatggtcatgcactttagaaaaatgctgaaattctagattatccagaatggaaaaacttcacaggggatgtaagaaattcagctgagcctctagaaagaccatgatttaggagaaaaaaaacaataagtaaatgctacaccttaggaatgaagttaggaaatagacctgctctaaaaataagatcaagcctcatagaataaaaacgatccagcaggaatttagctgtctgaaagatcaaaagtaattaccctctaaaggaagacaaatgtatgcaatctgtcaatcaaccaccaggaccagtatacaaacaacacatacaaaaaagtagagaatgttgatcactagttttaatagttgttatttagcttcctagttattatccatatacataattatgtcatttgcaaataggggagtttaatttctctctcttttctctaatttttacaactttttcatgccttattgaatgggttaaatgatatatattcttttttttttttttttgatatgatgtctccctgtgctgcccaagctggagtgcagtggcacaatcttggctcactgcaacctccgcctcccaggttcaagtcattctcctgcctcagcctccgagtagctgggactccaggcaccctccaccacacccagctaatttttgtatttttagtagagacagagtttcaccatattggccaggctggtcttgaactcctgacctcgtgatccgcccacctcggcctccccaagtgctggaaatacaggcgatatatactgtattctttttccttagatcgagttttttgaagaacatttgtatcagtgtagcaaccattaaatgcaattcatagaggtataggtaaacatcctttaaatagaattatctatctatatgtatatgtctgtctacgtatccgtatctatctatctatctatctatctatcatctatctatctatctatctatctatctatctatctatctatctatcttctatctgtcattctatatatctaaatatcccaagagaatttttaaaagttaaatgaaagagaggaaagaaaagagatgggtcagatagcaaacaaagaccaagaggtgaatgtaaactcaaataccttaataattgttttaaaattaaagtatagaataaacactgcctatatgctgtctattagagatacaatttaaacatggagacacaagaagatagaaagtataaaagtggaaaaagatataccctaaaatcattaaaaatgaaaaaagtttgagtgactgtattaatatcagacaatagtgatatcaaggtagaaagcactagttaagattttaaaaggaattttttaatggtgaaatgaaaaattaagaaagacacaaaaatccagatatgaattcacctaacaaaaatgtttcaaaatatctgaaaccaaatcacatggtagtgaagaaagaaaacgtcaaaactgcaatcataattaaagatttaacaccattttcacattgactgataaaataagaatactaaataatcactaagtctataaaatatttaacaagaactatctgctaaatttagtaatcaacatttattaaacacataccccaaagttgtagaaaacatttagcaacttagaccataacttgggccatacaaaaagtttcatgaaatttcaaatgagtgaagaaatttacatagtaagttaacaagattacagaatacaaggctaacatacaaaaatttattttatttctatataattaaaaactggaaaataaaataaaaatttaatatagaaaaacatgaaaatatgcaacaaaggttaatttaacaaatgatatgtataaatcttccacaaaaaaatagaaaacattagagataaaattttttatctaatatgtatacctagatatttttatctaacatatatatctagatatatatatagatattttatctactacatatatattgctttatataaataaagataccataattataagttggaagactcaatttttttaaatgttaattgtcctcaaagtaatagtcattaatgcaactccaataataaataatgcaactccaataaaaattgtaacaagtgatttcataaaatctaaaagttaattccaaaatttatggataaatacaaagaaaaaaacaaagcaaatttcactaagctacagaatccacaagaaaggattctgtagcttcgaattttatatcttgatcaaattatctggacaattgcaggtccccagaagagttattctaattctattgggagggttagaaaaagattgctgggaattgtaaaataattttctctataagttagagtagttttaacattgaataatttaaaattaaatataaatattgataattgtaataatattttaaatcaattatttcatgaattagatatatgcatttcattttagtcatttgctgtttgtaagagattcaagtataagggaatatcaaataagttcccattataaatcaaatataaaattctgttgaataatagaatcaaactttaggttttaaaggtagaagagaactgtaagtatttaagtaatattagcatatgcagaaaccataatattaaccatatttatgtgttttttggagtaatatgtgatggggttttgttgatttgtgcttggaaatcaaatatggtaaattagtaaatgcatttttaaatacttaagacaatttaattacagaaattgtataacccactaatatggtttggctgtgcccccacccaaatctcatcttgaattgtaattcccacaattctcacgtgtcatgagaggaacccagtgggaggcgattgaatcatgggggcgggtctttcccatgctgttcccatgatagtgagtctcatgagatctgatagatttaaaaatggaagacttcctgcacaagctctctctttgcctgctaccatccatgtaagacgtgacttgctcctccttaacttctgccatgattgttaggcttccccggccacgtggaactgtaagtccaattaaacctctttcttttgtaaattgcccagtctcaggtatgactttatcagccgtgagaaaacaaactaatacagtatataggtatcagtacagtgggttgttgctgaaaagatacccgaaaatgtggaagcgactttagaactgggtaacaggcagaggttggaacagtttggagggctcataagaagacaggaaaatgtgggaaagtttggaacttcctagagacttgttgaatggctttgaccaaaatcctgatagcgatatggacaataaggtctaggctgaggtggtctcagatggagatgaagaacttgttgggaactggagcaaaggtgactcttgttatgttgtagcaaagagactggcagcattttgcccctgccctagagatttgtggaactttgaacttgagagagatgatttagggtatctggtaaaaaaaattcctaagcagcaaagcattcaagagttaacttgggtgctgttaaaggcacttagttttacaagtgaagcagagcataaaagttcagaaaatttgcagcctgacaatgtgatagaaaagaaaaacccattttctgaggagaaattcaggctggctgcagaaatttgcaaaagttactaggagccgaatgttaatctccaagacaatggggaaaacgtctccagagcatgtcagaggtcttcacagcagcccttcccatcacaggcccagaggcctaagagaaaatggtttagtgggacaggccccctgtgctgagtgcagtctagggacttgatgccctgtgtcccagccactccagctgtgactaaaaggggccaaggtacagttttggctgctggttcagaggatggaagccacaagccttggcagcttccacatgatgttgagcctacaggtatacagaagtcaagaatagaggtttgggaacctccacctagatttcagaagatacatggaaatgcctgcatacccaggaagtagtttgctgcaggaatagggccctcatggagaacctctgcaacagaagtgtgaaagagaaatgtggggtcagaggccccacacagaatccctactggggcaccacctagtggagctgtgagaagaggtcccatcctcctccagatcccagaacggtggatcccctgacagcttgcacagtgcgcctgggaaagccgcaaacactcaatgccaacccctgaaagctgctgggagggaagctataccctgcagagccacagggtggagctgcccaagaccatgggaacccacctcttgcatcagcatgacctggatgtgagacatgaagtcaaagaagatcatttgggagctttaagatttgactgctctgctggatttcagacttgctggggcctgtagccccttcgttttgtccagttcctcccacttggagtggctgtatttacccaatgcctctacccctgttgtatctaggacgtaactaacttgcttttgattttacaggcttataggcagaagggacttgacttgtctcagatgagactttggactgtggacttttgagttaatgctaaaatgagttaaaacttttgagggactgttgggaaggtgtgattggttttgaaatgtgaggacatgagatttgggaagagtaaggggcagaataatatgatttggctgtgtccccacccaaatctcatcttgaattgtaactcttataattcccatgccttctggaaggaacctggtgggaggtgatttaatcatgggggtggggcctttcccatgccattctcgtgatagtaagcctcatgagatctgacagctttgaaaacagtagttttcctgcacaagctctctctttgcttgctggcatccatgtaagaggtgacttgctcctcctagccttctgcaatgattgtgaggcttctacagccatgtggaactgtaagtccagctaaacgcctttcttttgtaaattacccagtctcagatatgtctttatcagtaacgtgaaaaaagactaatacactcacttaaaggtgctggctagtatttactggaattatgtatagcataagtgtttcagtttgaactaaaaaagtgtaaaagcaaacttcttagttttttaaattttggcaaattgtatattaacttttaaaatgatgataatactaatgatgtttttatcggcaataagtaagctgagttcaaggataccagatattttgcatgtgtgagtttaaattttttttatttaaaaaagtgctactatctttatattgttctccctcttggcaatgttttagccattaaattacttcttcatttattaggcaataacagttttcttaaaacactcaatcctttgtctataactacatcaggaccttaagaacaccccagaggttatgagtgggtttaagtgcgccatctgtggttcaattaactgtacacacatttaatgtatttaatacagaaatacatttttttaatttttttaagcttttattttaagttcaagagtagatgtgcaagttcgttacataggtaaacttgtgtcatgagggtttgttgtacacagtatttcatcacccaggtattaatgctggtactcattagctatttctcctgaccctctcccttctcccaccatccaccctctgataggccccagtgtgtgttgttcctgcctgtgtctctatgtgttctcatcatttggctcacaattacaagacatggaatcaacctaaacgccagtcagtgatagactggataaagaaaatgtggtacatacacaccttggaatactatgtagccataaaaaagaacaagatcatgacctttgcagggacatgggtggagctggaagctattatccttagcaaactaatgaggcacaaaaaaaagataccacatttttctcaaaaatacattttgcaaagaagggagaccaaaactttagagatactctctaagaaaaaaaatgtaaaaactactgatctttaaaattaatgtatgagttcttaatttttgtagaaggacctacaaaagttcatgtttccaaatgtctttagctcctactcattctttatttttttgagacagagtcctgctctgtcgcccaggctggaatgcagtggcgcgatctcggctcacttcaagctccacctcccgggttcacgtcattctcctgcctcagcctcccgagtagctgggactacaggcgcctgccaccacccctggctaatttttttttttgtatttttagtagagacagggtttcactgtgttagccaggatggtctcgatctcctgccctcgtgatccacccgcctcaacctcccaaagtgctgggattacaggcgtgagccaccgcgcccggcctagctcctactcgttcttacccagtaacactactctgttttcttcacacattgggctgctacacaactctgtcacattgctcatcagagtatttttgtaccttctaaccatttcttagggctcattgtcttataactcttcctcaatcatgtagtaggaccaacctcagaggcaatatgcttgagaaaattttttcttcaatctgaagatgaatcaattgaccctaattatactttcagagcactttttaaataacttagtgttaaagactacctacaagtcattgcaattatgtgtttgtatttctacatatcactagacattcagccccttgagtgtttttatgctatttagcttaatcatgatcacagagctcagggaaagtcctccctaaagtatcttttttattgaatacatggactcttgaatacgaggcaccttatttagcttgttgatacaaaccaatagaatactaatgataacttatttcatattattattgaaaaaaattttctactgccaagaaatttgtttcaaaggcattgatctattttattgaatctctgcctttatttactaacctttcacctacaccttagagaggccaatgcttcagaaagagctagtcaagaagcaagctgaataggctctgctcaacctgggcacatagtctaggaatccagtggaggcaaagagtatctgtccgagtcagctagataaaggtaaataaatcgacatatacactgaacctgatcaaccagcagaataaaaaacaggtcaggattacctaacaaatgcatgcagatttaaatttattcttcttttaataaatgattgtaaactccttagaaactatttccctgtcttcccacaaaggcatgtgcttccacctactggtgaccttttttgcatatgactgtttcagttactgttagagagctatgaattcaagccacagtgagataccaaatacacacctattagatgggcaaaaaggaaaaaaaggcttacaatgcaaagtgctggcaaggctgtggatccatggtaactctcatacattgctgatggaaataacaaaaattacagctacttaggaaaatggtctggatgtttcttaataggttcaattacacacttgccatgtgacccaggtttcattcttaagcatttacccaggagaaagaaaaccatctctacccaaaagcttgtatgccaacacatatagtggctaatgtttatttggcaattaatagtttctaaaaacttgaaacacagaaatgtccactaactagtaaataggccgaatatctgcttcagactctatattcacacaatggataccacttggaaattaaaataaatgaactactgatatatgcaatatcatgaatgaatctcaaatgtgtcatgcaaagtgaaaaggagtccaattcaaaggctacatactacatcattctatttatatgacatctgggaaaagacaatgtcagagtgacggaaaacagatcattttttgccagtgactgtttgttggggaggcagatttactataaaaggtgcaaagaaattttataaagtgatgaagatgtattatatctttattttggtggttattacccaactaacacatttgtcgaaactcatagcactatgcactttaaaagggtgaattttattccatgcaaatgatacctttaaaatttttgaccttcaaaatctttataacaccctaaagatccacaagaatgaatttttatattgagaaatataaagcatttttcccagttcatcaaaacaatgttaataaaaatgttgttaaatattttctttatgcaatccacaaaaccttcttaacacactgacttaaccaactgatcagtgcagttcacctctttaccaatcgtcagaaaacaacatcattaaaaaactaacacattctttccaaaagtgttggttttgtctgctatatggagttcatacaattacacttcaccataagtaaattattttagacactttaaaaaatgtaaaattatatctaagttattacatggcttgtacagagaaaatactgttgaaaatgttgaaagatcatgatcagaaattactaaccaataggttttcaatcaaggagtagtgatattacatattaattacctttttctccaagtacttgctcagtctctttttaataatataattttctttctctaatactaattcataagaaggtagtaatttggctatatgataaacttttcaaagtaccatcgattttgtgtgtatgcataactgcaaaaacacatacagccataagtgtcagatagccaggtagatggttgattgattgattgattggttggttgaagacacagacagttgatgacagagagacagaaagatagaaagatgtatatgtaaaagcacaatattttaaagaaacataaagttcagtaattttcccaagctgaaaagtatacctttgaaaagcaattttaatgtgctaggcttcttttttcctaactctaaaaagcatgatcttctagttttattctcttacgtaaactttcaagacctctccttttttggcaatccagtttttatccagttttgtctccacttgagactaggtctttggtcctcctttctcatttatgagttcccggggttaacttatttatttagaggcaggatcttgccctgtcattcaggctggaatgcagtggcgatatcatagctcattgtaacctcaaactcctgggctcaagtgaccctccgtgcagcctttggtgtactattggatttgcttcaatgatatctatagtaattattttttctcaaaatagttttattctcacccatttttgtgtacataccatgctgaaataaaggtaatatacaaacatttgagctcctatttctagtaaaataaagtgaaatacctcaaacaactaaacaataacacatggttctaaaggattgtatgaagaataggtcatacttttaacattctggcagcatcaaatttagaaaatgaaggcaatgagagctttgatgtttttgagaagtgatgagttcagatctcaaagactgtaagccacaatccttgcaacatttaccaagtaactatgtgcctatgtgctgtataaatatcatacaaaaatctcagataaaactatgggacataaaacaattaatgagaaattaagatttaaatatccttggatttttaaagaaaaatgtgcatttcatatctacaccaactagttgaagtttacaggaaacatgaatgcacttttgccttattattatttataacggtgcagtttttatcatcatttacatttaaatgattttattattttctctgtgatttatcttcctttcctaattttctattgtggtaaaatacacataacaaaatttgccactttaaccaatgttaaagcgaacagaatatggccagagaagggctccttacttctatatttgagtccttgtggatgaactgcagcataacaataggtagacaagattgaaaacctaacttaggagtatgcgtctgtaacaatagctgagtcttggtccatcccagcagccacacctcaaccacttacagactgctgagtgtttaaactgtgttcaaataaggcaaatgtcaacctgtaaccaatccagctgtttctgtacctcactttcccttttcggcctataaatttgttctgaccacgaggcatccctggatttttgtaatctgctgtgattctagaggcagctagatttgtgaatagtctttttttccccctgctcagttaaaatctgttaaatttaatttgtctaaagttttcttttaacactaattttaagtgtgtagttcagtgatattaaatatattcacagtgttgtacaaccatcaccaccatccacctccaaaactctttttatcttgtgaacctaaaactcagtacccaataaacactaagtctccatcctccctttctcccagcccctaatcaccaccgttctaaacactgtctctataattttgactcctctagggagctcttataggtaaaatcaagcaatatttatctttctgtgcctggcttattacacttagaataatgtcctcaagattcatctatgttgtagcatatgtaggagttttcttcttttttaaagacggaatattcactttttaattatattatttggggtttttgtttgtttctttctttgttgttttgagtttcttgtaaattctggatatttgttattggtcagatgcatagtttgcaaatattttctctcactccgaagtgtatcagtttactctgttgattttttttttttttctatgcagaagcttttagtttacctcccactttctatttctgtttttgctgtctgtgcttttgaggtcttagtcaatacttcttaaactatactaatgtccagaagtgttttcttgggattttcttcaagtacttttatagccaggttttacatttaagtcttgaatacatcttgagtagatttttgtatatggtgagagataggggtctactttcattcttctgcacgtgacagttcaattatcctagcactatttctagcaaagggtgttctttccctagtgtatgttcttgttcactttgtcagagataggttggctgtaaatatgtggctttatttctaggttccctattctggtaccttgatttatgtgtctatttttattccaatataatgctatttggattattatacctttgtagtccaaagaagacgtacaaatggccaacagtcacatgagagaatgccaaccatcaaagagatacaaattaaaaccagttcacctacactctccccacccccaccacctcctagatgctgctttgcctgcaggcactcacatcatggccacaccccacgtcactttgctgtcacatgtgtgggggcggacctagccttcccttccctgccagcatgtctgtgcatgtgcaccctgccatgccactgctgccagtgtgagtgcatcccactcccctccatcttctctccccctgctgcactgccattgttatcagagcactggtgggcacagagcctgccagccctgctcctgccagcaccgtgtcactgcatctgggcgaccggcacacaaaagtaggcacagaaaacagctgacctacccatagccctgagtggacactgctgccagcatgaaggcacagaaaggatgcatagagtcctttactcaccagaaccccaccccagtgctaaccattatcagtgggaacatgcagtcactgacagcggacccttgacccccaagacaccactgcttctgcaaacgtgtgcacaggggctgacatcctgatacccattagcacactgttatagctgatgagcatgcaccccaccacactacttctgccacttctgctgccatatgcaaacaagaatgaatcttgctgtcattgccctgtgaagtgccctggccagaaacacacattgaagtattgtgactggtggtctgggagcaccttggcctctccagtgcaataggttcctaaccatgaggtgccacagatcaaatctagggccccaaaccagtcccccagagttaaagcctgcagtccaggagtcctgagctgagccttgaccccataaaatcttccagtaatgaagccagtcaattaagacctccttattccacagtcaaatcaccagggtcatcaaataaaattaaaaataatccaaaggacagcaacttaaaggattagaggaacatcagctcacaaagatgagaaagaaccagtgcaagaactctaacaactcaaaaaccccaagtgtcttcttttccccaaatgaccatactacttctccaacaggagttttaaactggactaagatggctgaaatgacagaaatggaattcagaatatggacaggaatgaagatcattgagattcagaaaaacattgagacccaatctaaggaagctacaaattatgataaaacaatacaggagccaaaagacaaaattgtcagtgtagaaaataatctaaccaactgaatagagctgaaaaatactctacaagaacttcacaatgcaatcacaaggattaacagcagaatagacaaagctgaggaaagagtctcagagcttgaagattggctttctaaaataagaaaataaaataaaaataaagagaaaagaaagaaaaggaatgaacaaaacctttgaaaaaatatgggattatgtagagagcaaatctatgactcattgccatccctgaaaaagatgaggagaatggaaccaactattttaggatatcaaccatgagaacttccacaacccagccatagaggctaacagtcaaattcaggaaatgcaaagaacccctgcaaaatacttcacaagaagatcatctccaagacacaatcataagattctccaggatcaaaattgaagaaagaatgttaaggaaaaatttaccagagagaaagggcaggtaacctgcaaagggaagcctgtcagactaataatggacctctcagcagaaactctgtaagtcaaatgataattgggggcctatattgattattcacaaagaaaataaattccaaccaagaatttcatatccagtcaaactaagcttcatgagcagaggagaaataagatccttttcagagaagcaaatgctgagaaaattaattgccaccagacctgccttacaagagctcctgaaagaagcactaaatatggagaggaaagaccattaccagccactacaaaaaacacacttaagtacacagaccagtgacactataaagcaagcacacaaacaagttggcatgacaaacacctaacaaaacaatgacagaatgaaatttacacatatcaatactaaccttaaatgtaagtgggctaaatgccccagttagaaggcacagagtgccagactagataaagaagtcaggctgaacagtatgctgtcttcaagagacccctctcacatgcaatgacacccatagtctcaaaataaggcaatggagaaaaacctaccaagcaaatggaaaacagaaaaaaggcaggggttgccatcgtaatttcaggcaaaacaggttttgaaccaacaaaggtaaaaaaaaaaaaaagactaagagagatattacataatggtaaaggttaattctacaagaaaactaactatcgtagctatgcatgcacttgacacaggtgcacccagattcataaagcatgttcttagagaccttcaaagagacttagactcccacacaataatagtgggagactttaacactccacagacagtattagacagataattgaggcagaaaattaagaaagatattgaggacctagactcaactttgggctaaatggatctgatagacatctacagaactctccaccccaaaacaacaaattatacatttttctcatctgaatatagcaagcacatactctgaaatcaaccacacaatgggatataaaacaatccacaggaacttttaaaggacacaattataccagccatgctctcaggccacagcacaataaaaataaaattcaatacaaagaaaagcactcgaaactatacatttactggaatattaacctgctcttgaatgacttttgggcaaataatgaaattaaggccaaaatcaagttatttgaaactaataagaacaaagatacaacataacagaatctctgggacacagctaaggcagtcttaagatgtcaatttaatcactaaacactgacatcaaaaagttagaaggatctcaaattaacaaatcaacattacaacaacaacaacaacaacaaaaactagagaagtagagcaaacccacatcaaagttagcagaggacaagaaataatcaaaatcaaagctgaactgttggagattgaggcaagaaaaaccagccagaagctgttttttgaaaaaaattaattaaaaagactgctagctagaataataaaggcggaagtggagaagatccaaaaaaaaacacaataagaaatggcaaaggggatattaccaccaaccccacagaaatacaaatcatatggttaggctttgtgtccccagccaaatctcacttcaaattgtaacccccatagtccccatgtgtggtggtgttactggcaggtctttgttcttagagctcccaagatggtggcgggccactcccaagatggtggcgggccactcccaagatggtggcaggccactcccaagatggcggcaagccttttgttctctgacctggggttcttggcctcatggattccaaggaatggaaccttgggccatgcggtgagtgttatagctccattagaagccgtgggtcaaggaagagaaccgtggaatccagagactagtgttcagctcaattagggcacttagccatgcaggaacaatggcgaacctttagtccgatcgggagtggcaatggacaccttgctggatcaggagcacagcagacaccgtgccggatccggaggggtggaagtcagtggcaggtctgccacggcgacagcggcaaacagcagtggtggacggctagcgaaagctcagctccagccataataaacacgggccagaggagtgtgcagttgcaagatttagtacagtgaaaacagagctcccatacaatgggaggggacccaaagggggttgccactccctgctcgaatgcctgggtttatatcccgatcattgtccctccctctgtgctctcaggtgataagtgatttgactatttctttaccttctgctttagcctaatttgtattttagtgagccctctttactacctgattggttgggagcgagcagacttacaagccctgtgtttaaaggtaggtgcagtcacctttcccagctaggcttaggaattcttagtctgcctaggaaatccagctagtcctgtgtctcagtgggtaggacatggttggaggtaactgaatcatgagggcagttttccccatgctgttctcatgatagtaagtgagttctcatgagatctgatagttttataagcatctggcatttcccctgctggaactcattctctctcttgccaccctgtagagaagtgtcttccaccgtgattgtaactttctgtggcatcgcaagccatgctgaattgtgagtcaattaaacctcttttctttataaattacccagtcttgggtattacttcgtagcagcgtgatagtggactaatatagtaaattggtaccaagataatggggtgctgctgtaaagatacctgaaaatgtggaagcaactttggaactgggtaacaggcagatgttggaacagtttggagggttcagaagaagacagaaagatacaggaaaatttgaaaattcctagagacttgttgaatggctttgaccaaaatgctggaagtgatatggacaacgaagtccaagctgagtggtctcagatggatatgaggaacttcttgggaactgaaataaaggtgattcttactatactttagcaatgagactggtggcattttgcccctggcttagacatctgtggagcagtgaacttgagagagatgattcagggtatctggcaaaagaaattgtctaagcagcaaagcattcaaggggtgacagagcataaaagtttgaaaaatttgcagcctgacaatgcagtagaaaaaataattatctggggataaatttaagccctccagaaatttgcataagtaacaaggagccaaaagctaattgcaaagacaatggagaaaatgccttcaggacatgtcagagaccttcacagcagccccctcccctcacaggtctggaggcctaggaaagaaaaatggtttcctgggcctggtccagggccttcctgctgtgtacagcctcaggacttggtgacctgcgtcccagccaggtacaatgtctccagtggccttttaacaatggtgcaagccccaagccttggcagcttccaattggtgttggtcctgtgggtgtgcagaagacaagaattgagttttgatcgcctctgcttagatttcagaggatgcatggaaacccctggatgtccaggcaaagtttgctgcaggggcagagccctcatggagaacctctcctgtggcagcgtggaaaggaagtgtggagttggagtctccacacagaattcccactgaggcactgcctagtgctgtcctccagacagcagaatggtagacctcctgaaacctcacactgtgcacctggaaaagccccagacactcaatgccatctggtgaaagctcccaggagagggtttgtaccctgccaagccacaggtgcagaactgtccaaggtcgtggaagcccagctcttgcgatcagcatgatctggatgtgagacatagcatcaaaggagatcattttggaactttaaggttcaattactgccctatgagatttcagacgtgcataggccctctagactctttgttttggccaatttctcccaaaaataaacagtcatatttacccaatacctgtatggccgttgtatcttggaaggaactcacttgtgtttgattttacaggctcataggcaggagggactagccttgtctcagatgagattttaaacttggacatttgggttaatgccagaatgaattaagattttgggtactgttagaaagacatgatttgctttgaaatgtgaaagggacatgagatttgggaaggtccagaggcagaatgatatggttaggctttgtgtccccacccaaatctcaccttgaattgtaaccccatgtgtcataggagggacctggtgggaggtaattgaatcatgggggcacatggatccataatgtctagcatttcaatttttttggtaccctctgctttttgtttctttttccccttgttttgccttaatttaaataacagtatatttatttagaattatattttaactaatcttggcaatataacatttatctatttgcattattttagctcttgctcaagagattataatatataattgtaacttttcacagtctattaagagttgcactgtaccactgtaccactttatgtaaaatgtagatatcatacaatgatttaagactatttatcatttctgaagtactttatgcattattttatgtgtattattcttctatttatcataagctcctggagatactgctataatttatccacagttatatattttaaagaaatgtatacgacaaacatagtctgcatgtttaccaaatattatactttccagggctcttcattctttcttgaaaatccagatatctactctgcataatttcttttttgttgaagtacttatttgttttattatgcaaattttcttctaatatatttaataatgcttttaatttcacttgcatttttaagggtatgcttattaaatatagaatgctgttttattttgatttgggtttgtttgtcttgatggtttgttttcttgaagactggtttcttttttagcagtttatagatatcattccactgttttctactatctcctgtttctgataaaaattgactagttattcaaattgctcctgccttgtttacactgttatttctctgtcctcttataagacattgtctgtatctgggggttcagaaatttgcctataatatgcttactataaatttatttctaactgattatgcttctatgattttttcgctatctaaatttatgtctttcaataatttgaggtgtatgggtcatcaccttttaacatattttctctgtatgttttatttatccttttcttttgggtctctagttacatctatgttaagtatttttatattgcctcacaagttcctgatactttgttcattattatttctaatcttacttctttttgtacatcagattagataactattttattgatctgtattcattctcacttatttttctgtcctcctaatcttctgctagggtcacttggtgatttttttttttttttctataattttctgtactgtgtctttcagttgtttaacttctgcttttcttttgtaacaatttttttttttttgtctttgagcatactttctggcgtactgattctaacaccaaagtcaccactgggttggccttcattttcattttccttgagtatgggtcacacttgctgttactttatatgcatagaaattggtatcctgtcttagatattatgaatagtaaagtttgaagactttggattctgtttttcaaagttatttgtattaaattttaaaaaaacccagacagttagtaagagctacattcagactctaaactaaaatcttatatcagttattttcacctgacttgtgctgctaggaatgtaactatgaatgcatactttaaagatcagacagagatttgagcagagactatgcaaagagttgtttttttctgcagttgtctctgtttcaaagtttgccctttttgcatacatcttagattcagttatttggttcttcaaagaagactacagtttttccatttggaatttaaccagcccacaattggggtgtgccctcaggcagaaatggacagattggtaactctcccagtacgtttttctctgccaatggccttctattcttgttcactctgcaatgccctcaattggttgtgatttctcataatttatacttatttgcagaagggactggttgatttaatagaagctactataccaggacccagaaaatgaatttttaattgtagggcaataattttttttttctgaaacattcaataatcgttgatatccttgtgtttcttccctattcttaatctataattctgtgacacgcttggaaagttatcctatttctccaagtattctattttgaggttgacactatttattgaaaaccttagtaataattggccaaaatatcctgaacttgcagtgttttaatctcattttgtttgaaccctataggcataacataatacagatatgacagcattttttttatttctccattaacttatgttgttaagtccaacggcttcaaggtgaagcagttgctataatatttatgaaagtcatattgttgcagagtccattacaagaaaggaagcagctggatcacaggttttagatataacttttactgcccaaggctgttatttaaactccaggactgactaaagtggtgtgatcaccatttttcaaaacatacttaccattttcacttgattttagccaaaaggctgagaagcaataacttaccattttctattagtattttctatgaagccagaaccaaaacatatgaggacaactgcatttatacatatatccatattatatttagcattccatttttttggtcataaacaacactgagaggtcttaatagtgttcattttgtgatttgataagaaacatattcaaaattctgatgagcagatgttttctgcgttttttttttagctatcatcaacaatagagctcctttaagagaatatcatgaaaatcatttagctcttatgtgtagtataaaatgtgatagtttagatagcattgcaaatgaatgctgactatagaaaaaaatgttggaggaaaaaagacagagtaggcaaacagaatttttaaagatttcttgctagttttaattttgaaacaggacttttctctggctaccttatattgaagactttttgtgtgatttcatcactctcatgactgaaatctcagatttttatttctagccaagatttttctcttaaatacacacactgtatatgttatattattaatatgttgtacatattaataatataataaaatataaattatatatgcatgtatctatctatatatacacacatatatatacacacatataattctatataatagcatttaatttttttacatcacactttgaggatggactttgagaaggaaatgtcggtgtgaggagtttcatggacccatatgccaatgaaacaacaatgtctgttaaaaatttttaaaataaagtctctggaaattatcctgagcagataaaaccaactaatagacattattttaaaaataccctaaaatacagtaaatcttggtaagaacaaggaaaatctgtgtgcttgagctttaacctaccaactttttctttccccatctcccattctggaataatagaaacaccattctgggtactgtggccatgaaaatgggattctcgctttcctcagctactaatcagtagaagcagaaagcctacaatttttaatctacacagtttttggtgaagagtctaaattccaggcaagtgtgtggctaagaaatctgttgctccttccctctacttggcacctcggattaaacagcaggctataccccaagtatggcagactgagaacactggggtcgtttatcatcatccagaccactcataaagaggaaaatgaatatgagtaagatgagaggctgccacccttgcctagcaccatacttagaaaacagagatgtccccagcactttgggaggctgaggcgggtggatcatgaggtcaggagttcgagaccagcctgaccaacatggtgaaaccccatctctactaaaaatacaaaagttagccaggtgtggtggtgcgtgcctgtaatctcagctactcaggaggctggggcaggagaatcgcttgaacacgggagccagaggtcacagtgagccgagatcatgccactgcactctagcctgggtgacagagcgagcctctgtctcaaaaaacaacaacaacaacaagaacaaaaaaaaccagaggtgtcctattgagagtagcatgatgctttcccacccccattcctggatcagtaattcagagatagtgcccaggagaagaggctggccttaagaacagagctccaacttctccgcagatgagctgactttagttggaaaacagtgtaagtaagttcaagaccaaaggtactcatagaaacaatggagacttctttagcaagcaattagtagggctatgacaacccagtgggagaaacagcgaaaccttagggcagctagggtaccagaggcaattagagaaagaacagagaaaaaaaaaaaaacctccttgtggtataaaaataaatctccaagactggtcccagtcttttactggcctaacctgtaataacaaaggtggcagtaattatttgttttaggctttgaaacaatttatatagcagaacattttttaaaacaaccggtaaaataatcggtacttaatggagcctaacagttgggtatgatatagtgagctatgatgcagacagcataacagtgacatcaggaaagagaaagtcaaagaaagccctggtaaaaccactgtcagctaagatgacagagaaacaaatgaagaaaaccaaaaatttcaaacaaacaggttactataaagaactcaacaaatatgtgtttattttttcttattttgttttttaaaagacaaaattgcataaactaataattgtagcaatatattgttggctttctaacataggtagatagaatatgcatagcaacgatatcacaaaaaggaggacggagaaaaagagctctatatgggtaaggcctccacattttggtttctcactagagttaatataaatctgaagtacattctaacaagataagatgaatgtaataaactctagaccagccactgctggggctcagaatatgacaccctaaaacctggcacctttgaataagcagaaaggtcattctgagcctttgttttgttttgctcccctgagattataaaaaaacaattgtgcctcctgtctcccctgaagaccctcatgtgagaggtgttctgccttatgcccagaggaaaagaataaacacacagagacacagagaagaatctgagcaaacaggccatgctaagttacctcctctttattactattagatcatactctttttgtccaatcgcacatttatgtgactgttcattcttcagtaaacctaactataaaaatacagaattttccttgggtctttggtcttcatttttcaagatgtttgtagtacataaagttttttgtttgtttgtttgtttgtttgtttgtttgtttttgtgacagcgtcttgctctgtcacccatgctggagtgcagcgatgtgatctcagctcattacaacctccgcctcccaggttcaagtgattctcatgcctaagtgtcccaagtagctggaattacaggcatgcaccatcatgcctagctaatttttttatttttagtagcaatggggttttgccatattcatattggccaggctggtctcaaactcatggcctcaagtgatccgtgcacctcagccttccaatgtgctgggattacagacaagagccatcacacccagtttctgtcacataaaactttggtaaaataaatttattatgcttttctcttgtcaatctgtcttttgttgtagagatactagccatgatcttatagtggtgagaaaaagattactttttcctctgctactccactaagaaaaaattcaaaaattataaaggataaaagcactaaagaattaagatgttacagtagaaaataatcacaattcaaaggaaagcagtaaagaagaacagagtagcaaaaaagatagaaaacaaagaaaaaagttaattggtagatgtaaatctattatatgaataataacattaataattatggatccaaaaaagttcaatctaaggcaatgattgccaggataaataagtaaaaatagggcctaactatatgctgtctacaggatacataatttagccacaagataaaaatagcttgaaagcagagacatacaaaaatctatatcatgcaaacagcaaacataaggaacttaaaatggatatactaacatcaaacaaaagtataatttaaacaaaagatgtttaagacataaattgattaaagggtgaattaattatgatataaatactatcaatatacacgcatctaacaacagagttgcaaagtacaggacgcaaaaattaacagggagatatagacaaaaaaaatagtggttgaagacttcgataagtatcatggttaattttgtgttaaacttgactgagccatggaatgtccagagagccggttgaacattatttctgggtgtgtctgtgagggtgtttccaaacccagaatccagaaggccagccttcaagcccagactgaattctgtgccaggggaagcatcagagccctggcatcaggaactggccaattcgcaggttggtaaaaagaatttaccaactacagtataggtttgaaaaaggaaagtttattagaaagcacgctgcaaaagggtgcagtggggcacctctgcatgagaggactgagtgtgccatggcggattttccttaggagcatttatggaccttcaggaagaaacttgaggataatttggaccacactagtcaggtttgtcatgatacatgattacatttgtagtaattttggtgccttaatgtaagcatgggttgcaaaatgagttgtggcatggcattctggagaagaatagaaattctagttataaattttacgttgaaaagaggcctggaaccagatgctgactttagatgctagggaagtttaagtacttttaaattcccgcagataaggagttttgcctccaaatgacctgtttgatggtcatcaggtggtctttgctctcttctaaattcctcagataaagagtttttgtctcatgtcctgttcaatggtcaccaggtgattttcgctctcctcattctgcactattggctctctggctctcaggtctactaaccacaccaccagcatttctgggtctccagtttgcaaacagcagcttgtgtgatgtctcagccttcatattcatgtgagacaataggctagaataagagaaagatataaagaaggagatgatagatacatagatagatagataagagatagataatatattgtttctccagagaactctgaataacacaaatataaaatattcaataaggaatggaaaaattgttcagaacaacaaggaaaaagaaaacttaaataacacaattagccaactagatctaattgctagatctcatagtgatatatagaaaacaacaccaaacaacaacaaaatacacattctctcaagtgtacacggaacattctccatgatagaccatagccaggccacaaaataagacaataaaatttaaaagatttgaatcacacaatgtatgctctgagtccataacataagggaattggaaattaataacaaataaatttggaaaatttccagatatatacaagttaagtataatactaataaaaaaaaccagtggttcaaaggagaaatcacaataggaattagaaaacattgagataaataaaaataaagacaacataacagaagtcatgggctgcacctaaatcagtgcatagagggaaatttatagctgtaaatgcctctgtaaaaaaagagaaagatctcaaattattatggggtgaattttgtatccctcaatattcacatgctaaagtgttagctcccattaccacagaaaatgattgtatttatagtctttaaaaaggtaacaaagatgaaatgaaatcattaaggcagaccctaatccaatatgactggatacagacaggtacacagggaagactatgtaagactcaggaaaaaggcatctaccagccaaagagtgagacctcagaagaaaccaatgctgtcaacaccttgatcttagaattgaagcctccagaaatgttaggctgtgatactttgttttgtgatactagttttgatacttgtttatgatactttgttttgttttgtgatatgtagcaaattaataatttaaacttctaccgtaaggcactggaaaaagagagaaaactgaattcaaagtaagcagaagaaagaaaacaacaaatactggtgtgaaaatcaataaaatagcaaaaagaagtgataaacaaaaaatttgtcctttgtaaaggcaaatatctacaaatatttggctagagtgaccaagaaatgagagaaaactcaaattattactatcaataatgaaagaacattactactgttcttatataagtttttttaaagattataaagcaatattgtaagcattagataacttagagaaagtgaaaaatagacaaaattaacaaaactgacttaggaacaaatactcaatctgaactgacctacaaggaaaatgattgaattagtgattgaaaaaaaaaattacaacaaagaaaaacccagatacagatgacttcagaagtgaattctagcatacatttgatgaaaaattaatagaaattcttcacaaactctttcaaaaatcagaaacaaagagaacagttcacaacccactttataaggcttaattagtttaataccaaactcaaacaaagacatggtaagaaaataaatctacaaaccaatgtctcttatgaatatagacacaaaacattctcagaagaatattaccacatcaaatccagcaataaataagaagaattatgcaccaaaacttgggggtggggaatttacccaaggaatgtaaggttgttaccatatcaaaaaaaaatcaaataatgctgtgagccatattattagaacacatgacacatacacacagcattatacaggaaacactagccagggcagttaggaaagaaaagaaaggcataagttaaaactgaaaacaatataatagtccctatgagaaaataacctaattttatatttgaaaaatcctaaaacgtctagtacaaacgaataatatctttggcaactaataaatacaattgaaaagatttcaggacataagatcaatatataaaaataaactatttccagtgaacagtcaaaagtaagattgagaaaataattccaaaggaataaaatagaataaaatatctagaaataaatttacacaaggaaatgaaaaacttgtatatttagaactgcaccccattgctgaaaaaaattaagaaggcttaatttaattttaaatatcacatattcataaattatgagacaatattgttaagttgacaatactcatcaaagtgatctacagattcaattcaatctctatcacaattctgacagctttgtgaagaaatgtaaatgtcaatactcaaattattatggaattacaagggaccctgaatgacaaaacaatattttaaaagatatctggtgaagtagctcatacctgtaaccccagtactttgggaggcctaggcaggaggatcacttgagcccaggagtttgagactaatgtgggtagcatagtgagagctcttctttacaaaaatatttaaaaagtagccaggcatggtggtgcatgcctgtggtcccagctacttgggaggctgaggtgtttattgcttaagcctgggagctcaaggctgcagtgagctctgatggcaccattacactccagccttgtttggcagaagaagaccctgtctcaaaagaaaagaaaaaaaaaaaactggaggagtgttactttctatttcaaaactactagcaatattatgttgtaccaaaataaggtcagacatatcgatgaagggaatagaactgatagtccataaatcaacccttatattaacaatcaattgattttcaagaaggttgccaagaaaattcaattgagaaagaatattcttttcaataaatgattggacaacgtaagcacatgtaaataagttggaacctttcctcacaccatatacaaacattaattcaaaatgtattacagaccaaaatgttaagagataaagaactcagaaaaatacattagtaaatattcatggctttggattaagcaaagccttcttagatatcacaccaaaagcacaaataacaagaagagaaattaggactttatcaaaattaaaaacatttgttcttcaaaggatatcatcaagactgcaaccataattcacagaatttgaggaaatgtttgcatattataaacctgataaaggatttgaattctaaactctgacaactcaatagtaaatatgtaaataaggcaatcccaaatgagcttatgattttttaaatacttatatatgcaaatgaccaataagcacatggataaatgctcaacatcattgctattagatacatgtgaatcaatcccacaatgagataccacttcacaccccatatatggctataatttaaaagacagattaaaaaagagacagataagtgttagtaaggatgtggagaaattgaaatcctagtatgatgttggtaaaattgtaagatggtgaagaaagtttaaaaagcagtttggaagttcattaaaaagctaaacctggccgggctcgtggctcacgcccgtaatcccagcactttaggaggccgaggcgggcagatcacaaggtcggcagatcaagaccatcctggctaacacggtgaaaccccgtctctactaataatacaaaaaattagccgggcgtgctggcgggtgcctgtagtcccagcttttcgggaggctgaggcagaatgacatgaacccgggaggcggagcttgcagtgagccgagatcgcaccactgcactccagcctgggcgacagagcgagactccgtttcaaaaaataaaaataaaaataaaaaaataaaaatatccaaactttagagttactatatgacctagcaattccattcctaagtatatgtcaaagagaaaataaaacatgtccatacaaaaatgcacaacagtgttcgtagcagtattattagtaatagttaaaaataatggaaacaactcatatatccacaaccaagtaagtaaatgtgttatgtccatacaataaagtaagtaaaatgttatatctccatacaatgaaatattaagcaataataagtaataaagtattgatacatgctacaacaaaatgaatcttgctaaattaaaggagccagcagccaaagaccacatgttatgtgattaaatttacatgaaacatgaagaataggaaaatccatagagacacaaagtaaattttcaattgcctaggtggggaaggtagaggagaaattgacgcatagtttatggatgtggtgttttggggagggtaatgtaagtattctaaacttgattgtggtcatggtttcacaactctgcgaatatgataaaaagaaaaaacattgaattatacactttaaatagttgaattgtatactttatgaattacacatcagtaaagctgttatataacaaaaaccattcagtaaaacagtgtctttataatttatattatacatatgaaaacagtaagacaggtgcggtgataacttttaaaaagccaattgaagagttaggagtagagtccatgtttgtctaattctgtcttcttgctgtggtctagatgttactgtatatctccaactggatgtcccatagacatccaatctcatcaaatgtggaattaaatcaaatataatgttcttgtcacataaagcagctgccttctcaatattttctgttttccttactttttaaaatgaaaccaccttggatatcccctaaagcacatcactctccttcattccttctgtttcaccaaaccctatcaattagaccatcttgaccatctggctctcttctctgagcctttcatggtctcgtatttgcctgaattactgtaactcttccttcttttaatctcaacttctctaatccattctaaaaataacatcttatttatctattgctgtacagaaaagaacttctgcacagcaaaagaaactatccacagcgtcagcagacaaactacagaatggtagaaaatatttgcaagctatgcaactgacaaaggtctaatatctagcatctataaggagcttaaacagatttacaagaaaaaaagccattaaaaagtgggcaaatgacataagcatacacttttcaaaagaaggcatacatgtggccaacaaacatattaaaaaatattcaacatcgctaataattagactgtaaatcaaaaccacaatgacataccatctcacaccagtcagaacgactgttattattaaaaagtcaaaaaataacagatgctggtaaggttgtggaggaaaatcaacacttatccacagctggtgggggtgtaagttagttcagccattgtggaaagcagtgtggcatttcctcaaagaacttaaaacagaattaccattcgacccagcaatcttattactgggtatatacccaaagtaatattaatcattctaccacagagacacatgcatgcatatgttcattgcagcactattcacaatagcaaagacacagaatcaacctaaatacctatcaacagcagactggataaagaaagtgtggtatacatacaccatggaatactatgcatccataaaaaagaatgagataatgtcctttttagcaaaaaggatggagctggaggccattatcttaagcaaactaacataggaccagaaaactacatacagcatgttctcacttataagtggaagcaaaacaagaagaacacatggatattaggaggcataaacagacactgggacctacttgatagtggaggatgggagaagggagaggatcagaaaaaataactgttgagtactgtgctaattacctgggtgatgaaattatctgtacaacaaacccctgtgacatgtaatttacctatataaaaaatctgcacatgtatccttgtacataaaataaaaattagaaaataagaaaaccactttaaaactcagttgctaaaaacaacaacagtttgttatttcttatgattctatagaagagttgggttcacttggttggttctttcctaggtttctactgtggttcctcagatgctatttcagtctgagactaaagggtctaaggtgttcacgtcaggagacttggtgctggctgatggctgaggctttctccatgttgtgaaaggaaaataaatcctgggaccccaaaatcactaagccaaggggcaagtcaagctggaaactatgtcaggcaaacctgcctcgcattttattcctaaataacatagctacaaagataagaagcttcatatcttcctcacaatttgcccacaaagaaattccttgtggacgtaggacagacagaactcaaagtcatccctttgcttatgtgagactaatgcatatctgattgtttcctttgccttattgtttcactaagccaggttaaggcataagggactattcctgtaagttacatattcactagaaggctaatcagaaattcaaaagaatgcaatcatttgtcttttatctacccctgacccagaaaccccctcccctattcgagttgtcccccttttctgtactgaaacaattacatcttacatatattgattgatgtcttctgtctccctaaaatgtataaaaccaagctgtgccctgactacctttggctcatgtggtaggccctcctgaggcttttcacaggcgtgtccttaaccttggcaaaataagctttctaaattgattgagaactgtcttcttggtttataatgtgatttctcatactttgtaatactagcccagcctgcctcacatggtagagggaggaatttcatagagtaggcacagaagcttcgaggccttttaaattctagggtctggaattcacacaatataatgtctgccccattctgttcaccagagtaagtcctaaatgcaacccagattcaagactaagggaaatagactccttcctttgataaaagaagctgcaaggaatgtttagtgcttaatgaatataatacatgtggcaatgcttaagcaaccaaataaatatgattaaaaattgctttgttaatcccagttgatgtttacccatgatctacatgacagttacagagtattatataaataacatacatttataacaaaataacataaattcaaggtaagaatatgttttagctagctggcatcaaatattgcaatttaatatcttgagatggggaatgatatttttagtttccccttcactttgttttgttaaacatttaaattacttgtctatccctgtagaaaactgaatttgtaatctttagattacaatgaaaccaaaaactaaattaaaaaaaattatactcctagcatgctaagcaattccccattcatattctcattatatgacttttcagctaaatattactattcctctcagaagttttacaagtcacaaaaactatttgattaattataacttccaggctttgtgatgataatgcacacctcttaggaataaggaagatgaatatccagttcattggaaacagaactggggaagaaatagggatctcagtagcaaaaatttgggcaccaggtattcagaagactaccatcaaatgacttaaccaaatcctcaggcatcttttcagtttcacatgcctgagagatactctgtggaatttgcatggattcctaaatcatccttaagccaagggagtaacagcagttggggctggctaatgtcagtctcatcccaatcacaattgtcagagacacagatgtcagatggactagtggggacaatgtaaaagaagagaaagggagaaacacttgaagttgccagaatttagcgagcttttcaaaaacactacatctctgactctacctttgctgttccttctgcccagaattaactatataaatgcgtggaacagaaggctctgaagattcacttcaacctgacttaatttcaacagaatacaatatttttcatataggaatattttaacaatactctggaggaactgattacatacttatgtagaatagaataggaaaaatggtaatatgatgaaaagactagaatttgcattcctatattagcacttattagccatgcatttttatttttaaaacaaattacttgctaccagaataaataaagcaccatcttccacagtgataaaacttcagaaccttacaggctatatggaggatttatctgagaacccatattttttttcctagtgtggaaatgggaattcaacttcagctcaaatgcattctgcttgtctccaggaagccttgccctacacactctcagcatcctacctaccaggacaaacattttcttgtaaaaccacctgcccaaaaacttcacttcatatttctgtttctacctgtacaacttcaggcaggggtcttttaggcatattggcctcttcctccaaaggactgctcctttcatttccctctaacattgcttagttactcttcctccatatctcagctcaaccatctccaaagcaaaatcctttgatcttcttaattatatcaactctacttactgtgtcctttacaatcattaatgccccaccgaaaagttgttttctgatacaaattactatttttttcactcaggtcatctgtatatgctggaacactcttccatctatatcattcttatcttttattttgggactaaatggtatcttcccagttattgcctctgagaacctcttacttgtctttgttagtaacataaaataataatagatcattattttattttttatttaataatattaaccacactagtatataatctgcacacagacaggctctgtcttattggttactgtatacccagttcaatgacagctgcacaatagattagcaaatgaatgatttagtgaatgtatcagctgacatgctatggcaagggttgtctctttctttagcttatactgagcccatcacctctcagagttttttgttttttttttttcctagtgcataacacagtacatcatcctagatatcctgtgaacaatttagtatttgcacatgaaccttgcttctcttgcatggtttcatatctctttattcatccaatttatctgccttattcatagaaattttcatttccttgaacatgtttcatcacctgtggaataaaatcattatgaggctttgattacattagacctatacgaaatgttgtcaaatgtaaggcattctgcagatgatttgtactaatagtacctatagacagtgaaaatgaccgtaaccaaaatcttgaaaatttttatcactggacagtataatttaagaaccttaacgaatgctaaaatactagagttaaatgcattgcctagcagtagttttcccaaaaatttaaattcaaaatttatttttctgttttaccatgtatgtggtcagcccacatttatcttgcagtctgggatacataaatgatataaatagaccaatagacaaaatgagaaacaatatattgcttaatcacagttctttaagtctgacataatgagttataattacttttaaataaatgtcattgctaactggaagaagtctttttttatattcagaattaagtttcggtatttcactgaagaataaacaagtcttttataatagacctgttttcttttgtctcaatatcataacaacactgcaaatcaagcagagttgttatgatgagcacaataaagtttttttattagacatagcaaaattctcacaaaacaaaatgtaagaaaaataaaactgtatatcttaagttaaattgtcctatacatgttacggtaaaatatttctctattatcatgccaattacttgtctacaaaaatgaacattcattgctgtcctaatcaatagactgaagtaacagaatttattgattaaatatacatttaatttattgtactgtttttatagtatatttatgtaaagcattacttaatagattccattctaaaaatttactaattttaccagtaacacaagttattagtaaataaaaattaagccatatgcaatttttctactgctcataggtcttagttaccaacttttatattggttattgattttgaattataacaattacacttataaaacaagttagctagttataagaaaaaatggcattatgaaatcataaaggaatcctcagaaatttttacctataatataaagctcaaatttcagaccctgtgtgactaggaaacaatagcaagaagagacatattgaaaggcaatctcttggcactagaactttacgttcattgcagcactattcacaatagcaaagacaacccaaatgcccatcaatgatagactagataaagaaattgtggtacatatacaccatggaatactatgcagccataaaaaggattgaggtcatgtcctttgcagggacatggatgaagctggaagccattatcttcagcaaactagtgcaggaacagaaagccaaacactgcatgttcttacttataagtggaagctgaacaatgagaacacatggatacagggaggggaacaacacacactgggtctgttgggggctggggtgcggagagggagagcattaggaaaaaataactaatgcatgctggggttaatacttaggtgatgggttgataggtgcagcaaatcaccatggcacacatttacctatctaacaaacctgtgcatcttgcacatgtaccccggaacttaaaaaataataaaaaataaagaatgcaaataacatatttaaaaatgaataaaataaattttgcaatacctcattcagtaaagctttacattgaagagtgaatctttacatattagttttagtgcaatattaagaaaaataaaatatataaatattggataacataatcaaaagctatgcaaatagcagaagagtgaaattgattcatacaagtaaaaggtgtgtgtctactggaaatcttgtttgtaactaagtacagattttgatcagtgaatagttttaaattgatttcaaacttattaaaattttttatgtcttctgggagaggaaaaaagaaaacagagataaatatataaatcaaaattattttgtgacatatatgttttttcatatttcagcattttagtggagtattagtgtaattttgcaaccttagttgagtagctagttggtcctgctaaactaattgtcgtgaaagttttataaatactcttcggagtcattgtcctctgaaaagttagctgagtgtacatattggaccacaagaggattagaatcagacatggaaatatttatgatgaaagggcagatgttttacttcacagacgtgcttcccagagggaaaggtgcattgtgagtattcctcacagattgtcaaaaaacaaaaatgacttggagaaaaggggagtgttcctaatatgattggcttttgagagttttttcaaatgcaaaaaaaaaaaaaaagaattaaatgggagccaagaaggttaagggaagtaggtaaatttgaaaatggtgactataatgctactgattatggctactttccttcagtttcaagtttcttgtttagatatctatgggtcagtgccctaacattttcattttattattttgaagataataaaatgaaaattagtgaaacttaaattgacttgtttaagctaggcattcagttactacataggcttttatttctaccattctgaagtacataattataccaatcccttaacagaaaataacaaaacaattgttgaaaaggattggagaataactaagtcagtcaggatggagtggacaaaaaatcccatagacaaggaaaacatgagaaagtaagcctcagatttgccactgctttttctcttgcgttatttgctagttcacagagcagggaataaaggcttaaggtaaacctggggccactgacttgcagaggtcttgctgagatgtaagatcagggtagataatttagaatttgtgttgcctagaagttgaacactccaagttcaaattaagtaagccaaaaattctgtgtgcagtattccctccaggcatttgtcaaatcttaaactgtctattctcaggctgaaatgcccaaacccaaagcaaataacaaacaaacaaacaaaaagaacaagtgagtggataacaaactcacaactataattttcgtaatctctctgttagagagagacacaagtttgtttagaactcaaaagctagaagagaccatttaaaaatttcagactctagttttgacccaagaagagctaaccttgatgggatgttggttagctaccacatttggtcatagaacaatctgaagcaagctggctcaattatattatctacgaaaataattacaaaatacgcatgtgcatactcatctacataatataatggtactgtcttaaaagaaataataggaaaagtgaaaagttgtgtagtcacattattatcttctgcctcagctataattcagttgtttttaggtcaaataatgcaaaataacttaaaggtagcaacattcagagaaaagctgttgtgcttttttgcttaaaaattaaatatcgctattttaaagtacaattcaattagtttataaatattgcagtatactattacaaattcaacctttatattaaatcataatgaaattgagatataattatgttgacataaacaaaataaaaatcatactaaatatctaatgctgccatcaatactatgttcataaatgccaagacaaataagaatgactcttcaaagtaataaattacatagaaaatgtagaaaaattagctgagactatgatgtaatatttattattaaaatttatgatcaattactgattatttttaagaatgtggaaatagaagttcatccaaagaaatactccaccaacaataccaatagtcatttagccaatagctaaggattctcttataacaaataatttacagggactctttacatttgcaaaactgacaatagctatcttctgttagtttttatattaaagtttgaagttgcttaatgaaattgctataacataaatgccaaacataatacacagaagtgtgaaaatcattgatgtatttgtaatataaacaaataaaataattcatgtaatcataattaagtcacattttacctaaccataaactatataaggaatagcaagcaagagtaagtccagtaggaagaattcaaaaagttgttcatagacttctgttctaagcaaattgcatggaattagcatttataactgtgaaagaaataagagtgaacaattctgtttttaactttattttttaaataatcattcactgaatatgcaagatataataatatactacatgctatctaaagtgtagacccaccgagtagagtttatctgaaaactgcttgttgagagttagctacaagacaagtataaaaagtgaattagtgtttagaaacatgtaaagcacattgcaatgacactttttttgtatattgtagaagtatggaatattttttaaaagtgtcttgcactacagtgagtttaagaagcatagtaatagaacccaaatgatgactacagtagagaagaataaaaataagggatgggatgaggaggagtggttgaaatactactagtaataaaatatatttattattgcttttataacatccagtcatattgctaagaaatttacacagatgtatacatttgttttattctctaaacagtaagtttaaaagtattattattgttgtttacagatgaaactgtctccaaaatattaaataactctgaggtttcaagagtaatatataaagagaggaaattgcattcagatctaaactaaaatctggtggttaatcattttttattttgtgccttttccaaaagcaaaaacaagcattataatggcacctaagatgatatttgtaagtgtactatatcaactacaaagttttacacaatctggtcttgaatcagaatattctcagctgtaacatgaaaatacaaataagagtaagaagatattacttaaattatgtctttattctccgctgtatgtgagacagtggattagatgttttcacaaacattatttaacataaccaatagctatcagcaagtcaatataaatgttcagggctgctttgatagtagaaattaactatgcctatatgttactgtgtgttcaacaaatagtttacagtttacatctctaaatttgacaaaggattccttctatgaaattcactaaaatctgatagcacacagtcattattagattaattgaaatcagaatatagtcattagaaatataaagaaaatccaaacattgaacagggatagaatttcctttatttttgtgttttgctgtagaagctagtatattccttctcaaggataaaattatagaactcagcagtcctaaggagacatagacatcttatgcaaatttgtattatatagccatgtatactgacatccatgtagatacatttttcctgaaatgatgattagtgaaaaattgagtctacattatttcacttcaataatttaaaattttattgaagagtttattatacagcaataataaaaaaagataagtatttccattctcatgatgattttggccacaatgaaaagggaggtgcattccaggactataataatggttcaatactgggaaatttattaatacagactaatatacacaaattaagttataggccttaggaaaaaactatatgtgtatatttgcaatactttaaagcctttcagagaagtcagcatccattcctaattacatatatttttcatgagaatgtagaaagatatggttaattccttcaagcgataaaatatatatacctcaattggaaagtccacatcttaatgggtaaaaacatacaggtagtcccacaagagtactgaaaaaaagtgcatgcccactctcctcactgttatttaatattgttattagttgatgcagttagatacaattgtcacacaaactagagcagcagaaaaaaaagtgtctctatttgcagatgacaataatatatatcaataatatatatagatgcctaaatgataaaatataaaataatgcaagttggcaggttatatttttaaaaaatcactattatatctatattcgcctacttatctgtttattatctatttgccatccaactttctgtttatgccaattagataatggaaagacatccttttttcctcatttagaaccactcaacatcatcatgaagtcatttctacataattgatttataaatttgacgttatcccaagataaatcataagcgtttttatttatgaagctaaataaatgaatactaaaattattataaaaataaatacacagaatagagaaatatttaaaagtaaagctgtgagggaggactagccttattgaatataaaaatagttcactaaggttttatcattgaaatgataactatgtgtggatacccaagagaagggtatagaaagctgaaaatagacccagttacatatattaatctagttaataatgaaggtgttatctcaaattactgaagaaaattgaacttcttaatacatgaatatttatttgaaatatggtaaaatcagatttaatactcagagcttatataggagaaaaacccaaattgttcagagatctaaatgtcaagcatagaatgttgagaggcaagaaagaaccccatggtttgaattggaataagggatttcaatgtgaacttatgatgtctaaaatatgtatatgcatgcatatatgcatatgtaatatatatttcacttatgtataaatatgtgttttataataaataatatatttgtacacttctgcatttacttatctctatttgttaaaatgatctaaatgcaaaatcattccaatagcaatgagttcatataactatctaacatccagatcttgttttttaataccattcttcactaaaagaagtcagctctttcacagaattgctgattctaagggtaggccagaggaggtaaaacatgagtctggaaaattttatttgccataaaggaggaatgtgatcaaacagtagaaaattatggagataaacaatgttgaacatatatcacaaagacacaggaatcagcttaaaggggttcctcatagccaagtctaggaccatttgagcacctaagtatttaaactcagtgataaataatacacccttaagtataagaattcaggggtccataactataagaagaaatatgtggggacttgttacagatcatagattagtaaataaaaaaaatggcaatcatgctgtggacaaaatcagcaaatatcattcgccaggtggtccaaattaacatcactaatgccaggcagatggcatgagtttccagatgttactttctgtcaaggacatgttggacttaggtaataggcagcctgaggatgtgtaagcttcatttataaagaaggaagtataatacatatttaaaaatcaattttaataaaattggaaaataaaaagggaaaaagactgaaaacttctatgtcaatttaagaaaagtatgaagaatttttctagattgaagtagactaaagagaaatgatatgcaaatgtaacaggtgatcccagaatggattttccttggagagagaaaaatgtgctataaatcatattatgtgctcagttggcaaaaatgggtatggaaggtactgtatcagagttaaatttgttgaagttgataatgtcattttttaaaggaattttcttgttcctaatatatttaatgtaaagatcgatgatatatgcatctaactctcaaatagttcagcaaaattatatatatataactacatatgtgtgtacatatatatgtacacatatatctaatacataagatgtatatatacatgcatacatacctacacagagagcgcaatggggcaaaatatcaatgagaggtgaatctgactggtaaaggatactctttgtactattcttgaaatgctttgtaagttcaaaattatatctgaaataaaacaaaaaaatttcaaactgaagatattttgattatattgagactgatgttttaaagtcccaagaagcaggtcctgagataaaaatgggtaagtcaatgatttttataaaacctggtggcaagacaaacaggtaaatcaatggcaaatttaagattaggaagtggaacgagctcaacaaggatatgatttcatccttgaagacagtgttcagcttgatcccatagggaacttagaaatgaagtcaagccccagtattgttctgctccatcaatggcaagggagctgaacttctggctttcctggatggcagaaaaaggaggctcccattaggaggagtgcaattctcagaagaatttgggtggctggcctgtggaaaacggatgcagtaggaagtgaggatgagggcttacagaaaaggtagaaaggaatctcagaagagctagatgaaacactacctcatgcttttatagtttaaaattcccctgaatagatttttaaagtaacatgtaaatttggaagagatgaaaactttgaattatttaaatacagagatgatggttgttccattccagacatcatttttgaaggttagctatcatgtgccagatgtcttacaaaaaataggtgtgtgtgtgtgtgtgtgtgtgtgtgctgtttttgttattatttatcttaaactctctggacatataaaacctgttttgctttagtaattaaaggcaactttttttctaaaacttagtgctaagtgctcaatacctaaggagagaattagatcaaacaatgtggttttaatatactttttgtcttcactaatataaggagataacctattgggggtttcatattttctccataatgttcataaggtgtgctatcggcatttcagcaatatagcctccttgtgggctatagcatttcaatcattacaggaaatttcacttctctggactccatctgcaaaagatcagtagcgctcttcctcccccacattgaattacataaaaaactgctttcatctgtatataacatgtgattctaaacatcccttaggtttaagtggctatagtatgtattagcataatattgaagtttaaggaaagtaagagtttaaacattcaatgtagacattgctaaatgttttcttccaatttgaagggttacagcatgttactttttttcttgagtgttatcaaactcaaaagataatagctaatttacagaacattatttctactgggaaaaaataatcacatttaatgttatcaaagatatggatataatctaaataattttaactgtgcttaggttatatttaaacattaaagatagcatttcttaaaaattagtattttttaaattttattttattttttattatactttaagttttagggtacatgtgcacattgtgcaggttagttacatatgtatacatgtgccatgctggtgcgctgcacccactaactcgtcatctagcattaggtatatctcccaatgctatccctcccccctcccccccccaccccacaatagtccccagagtgtgatgttccccttcctgtgtccatgtgatctcattgttcaattcccacctatgagtgagaatatgcggtgtctggttttttgttcttgagatagtttactgagaatgatgatttccaatttcatccttgtccctacaaaggacatgaactcatcatttttatggctgcatattattccatggtgtatatgtgccacattttcttaatccagtctatcattgttggacatttgggttggttccaagtctttgctattgtgaataatgccgcaataaacatacgtgtgcatgtgtctttatagcagcatgatttatagtcctttgggtatatacccagtaatgggatggctgggtcaaatggtatttctagttctagatccctgaggaatcgccacactgacttccacaatggttgaactagtttacagtcccaccaacagtgtaaaagtgttcctatttctccacatcctctccagcacctgttgtttcctgactttttaatgattgccattctaactggtgtgagatggtatctcattgtggttttgatttgcatttctctgatggccagtgatgatgagcattttttcatgtgttttttggctgcataaatgtcttcttttgagaagtgtctgttcatgtcctttgcccactttttgatggggttgtttgtttttttcttgtaaatttgtttgagttcattgtagatgctggatattagccctttgtcagacgagtaggttgcgaaaattttctcccattttgtaggttgcctgttcactctgatggcagtttcttttgctgtgcagaagctctttagtttaattagatcccatttgtcaattttgtcttttgttgccattgcttttggtgttttagacatgaagtccttgcctatgcctatgtcctgaatggtaatgcctaggttttcttctagggtttttatggttttaggtctaacgtttaagtctttaatccatcttgaattgatttttgtataaggtgtaaggaagggatccagtttcagctttctacatatggctagccagttttcccagcaccatttattaaatagggaatcctttccccattgcttgttcttctcaggtttgtcaaagatcagatagttgtaaatatgcggcgttatttctgagggctctggatcattttaacgtgcatttctcactttatgttctttgctaatgacttacttcttgctgtttattttatatgtattttagaccatggaaatcatattagacaaaaagcaatttcaagcaattttcttattctagttcaaaatgggccataaagcagtggatacaactcacaacatcaacaacacgtttggcccaggaactgctaacaaacttacagtgcagtgatggttcaagaagttttgtaaaggagacaaaagccttgaagttgaggagcatagttgccggtcactggaagttgacaaggacgaattgagagcaattgttgaagctgatcttcttacaactgcatgagaagttgctgaagaaatcaatactgaccattctatggtcatttagcatttgaagcaaattgaaaaagtaaaaaagctcagtaagtgggtgcctcatgagatgaacaaaactaaaaataaaagtagattgtcatttttaagtgtcatcttctctttttctatgcgacaacacgaaaccgtttcttgataggattgtgacgtgcgacaaaaagtggattttatataacaaccggcaatgactagctcagtggttgggccgagaagaagttccaaagcacttcccaaagccgaacttgcaccagaaaaaggtcatggtcactgttgggtggtctgctgccagtctgatccactacagctttgtgaatcccagagaaaccatcacatctcagaagtgtgctcagcaaatcgatgagatgcatcaaaacggcaaggcctgcagctggcactcatcaacagaaaggggctaattcttcacaaggtccagtggcacgtcacacaaccaacacttcaaaagttgaatgaggccgggcgtggtggctcacgcctgtaatcccagcactttgggaggccgaggtgggcggatcacgaggtcaggagatccagaccatcctggctaatttattagaaaccccgtctctaataaaaatacaaaaaattagttgggggtagtggcggcgcctgtagtcccagctactccggaggctgaggcaggagaatggcgtgaacctgggaggcagaacttgcagggagctgagatcgccccactgcactccatcctgggtgacagagcaagactccgtctcaaaaaataaaataaaataaaaataaaaataaaaataaaaagttgaatgaattgggctatgaagttttgcctcatccaccatattcagctgacctcttgccaaccgactaccacttcttcaagcatcttgacaactttttgcagggaaaatgcttccacaaccagcaggatgcagaaaatgctttccaagagttcatcaaatcccaaagcacggatttttacgctacaggaataaacaaacttatttctcattggcaaaaatgggtcgattgtaatcattcctattttgattaataaaaatgtgtttgagcctagttataatgatttaaaatttatggtccaaaaccgcaattaactttgcacctatctaatatattaggagatacacaaactgaaaaatagatgaaatgttcttattcttattttgatatatgactaaataaaagaggttaaaaagagggaaaatacatttgtgtgtgtgtgtctgtgcgcctgagtgtgtgtgtttaagtcaagtgtgggaattgtttacacaggtcagaattaattataatccctgaggtagtatcaaataaggtaacaatagcaaaccaagtatagtgactcatagtctttgacaactataataaagtatatcaaaaaaaatatttttgagagttagctatgtataagaaaataatgttatgttatgtcttcataaaaaaactatcacagagacattgctcattgtgattaaaatgaaatgtttcattttaagtatgtgtatggacagtttaaaatggaatttaatggaatgtctggaaaaagagtatatatacttcagaatccttataaaataaaattgaaactataagaaacatgagataaaatattttataaatacataacaattattttttaatcaactgattgtaagtctagcaattatttggtatatttgttagagatataatcaagtcactttcagtctaacattttggcattgagaggttagttttcaaaaacataataatcttaaagtccatgattgaccaaagaaatataaaagtcagctaaagccactgaaagcccactcagtgtagagtatttgatgacatatttgagataatataagtcaaattctatgaatttaatggaaagatgagaatggaggtaaaacttgaacttgtacctttaaagaggtaatgaattataataggctatcttattccctcatataaatatgaattcatgtagatgaacattttatttccaaaatagttatcttagctctcagagacattacatttccaagagtaagacataggcttactgtaagactttctagtagtccaaaaatgtggtgattgaacaaagatccataactttttatttcccaaacttacatagctttgtctaaaatatcaaaaatgtatatccgtttcctaggattaatgagtaacttcagtattgaaaatattaaaatttatatttttaaagtaaaatttggtaattaacaaagttattttaatgcttagaggctttcaatatatataaacaatataagacatttatttttactttcttacatggacgtggcagtttattattttaaaatacacaggtctaaatttttgaaaaattgtttattttgacaggacaaagtatagaatttttcttatcaatagcagactcaaggctaattttggttttaagagaagtgaaataatcatactacatataaaaggattataaattgatataattatactagactctctttcatagtatatttcatgaagcattaaaacatttgtatttataattttatcatttctacttctagaaatccagccaagagaaatgatcctacatatgcaaagttttatacagaaaaatgttcactgtggtgttactactaatgataaaaatatgtaatctagatataaaatatatttgatggtttgataatcatatgaaatccattaacataaccatcagggagtaattgaaattgtacttacaataacatttaatcacttggaaaatttctaattttcttttgctaagctaaaaagcaagatacaggtttgcacacaatataacattagttttaattatgaaaatgacctagacttgggacagaaattgtcaagaaatgtattaatttacagcatcataagtgatttatgtgcataacaatttcaccatattcttttaaacacttctcattttaagagtcttaaattttcctaatgtgagggttataaaacattctatcattaaagtctacatctgtgtctacctaacagttagaaaatgtgtaaataattttatttcctataagctatttgcattagtttcctagggttgccagagcaaaatggaggccagacaaaacataaaaggccagacaaaacataacaaaaagttcacacctctagaggccagaagttcaagatcaaggtgttggcacgtttggtttcttctgagggggtctccccttgactttcagatggccactttctcgctgtgtcttcacatggtcttcgctctgtgtacacgtgcccctggtgtctgtctccctctgtgtcctaatcttcccttcttataaagacaccacgcatattggatcagggcctgggttaacttaattatcttttaaaggccctatttccaaatataatcacattctgaggtactgggagtgctttgacataagaattttggagatacacaattcatcccacgacaccattcatcatttctcttcagagaatcaggtttaatattttctatatctttctccttacttcttgttttcttaatgattttgcataagacaatttatttaaaaatatttcatgatttttgacatacaaagtttcctgggttttataaatacataattttttttggtctcttgattcttttcagctctgttatttccaatgatttcgtattgtgtgtgatagaagcagaatagtaaacaaaagcttcatttctggaattagattgcctggattttgttatagttttcccacttactatctgagtaactttgagctcgtcccttccattggtttcttcatcccttataagggaaaatagaaccaaccttgtagagttgttgtcagaatttaagtaatatgggcaaagcacacagaacagtttctaaaccacattaaacaacaaatgattaacacttaggaatgacacctttagatagctccatgattagtacataagaatcatatcaaaagagtaggtgttacctttaaaatataaaatatgaaaagtaaacaagagaagaagcataggttttgtgaacaaatctgtgcttctgtaagaaagcagtaaatagaagaaaatacatcaggctttgccatcaaaattgatactaaacattttagctgtgcaaacttagaaaaataagctctcctctctcagcttcacttctgacctgtaagaccaaaagaatattttctgtatatcaggacaatgcttgttacatcgattaagaaaaaaagtgtcagttttctagtttctacttcttcaggatgtctgtaaattcaaaatggttgtccagctctgtgaagttaaaatttattcacaattctataaacagatttgtttttttgccatgtgtttctgcccaagactttttaagtcctcagaatgaatcctgacttgttattgtggccactttctatgttgatgtgcgcagcacacatgtccatcaaagtcttcctctgcagttagttaattcactggggcacaggctacccacaccaatggcacaaggctacagaaatctaatacatcatcttccttttcactgtagcagaacatctcttttcacttttaactatatgtgcaaaaccgcatagagggaaagattaacaaaaatatgctctccatccactttaaacagcctaaaaaaatggctctctgcaacaacatggactaatctgagagaacaatttaaatgtaaacctttgtcctttccatttgggtggatttggcaacagataacccaataatctgatttccatgaagggtccagaataaaattcatattttggccagaataatatttatgttttacactcgcaaaataacaactgtatattggcaatgcaatggtaaactagttaaaaagccccctgctctgaagaacttaagaattgaatactgcgaatcaatttaagtcaaaataagagtgtgtgtgtgtgtgtgtgtgtgtgtgtgtgtatgaataaaggaggtaatattccatgtcaaattctgtaagaatggaaagagaaaacagattgagaatagatgaacttggcaatcagaaatttacagtagaatagaggaaaattatagtagtatagtttgtgagtagtggagatattactatgtttgaaataaaaaagcatatttttagtaatttaataaaatatttagttgatagtacttttatttttgatgataaatataaatgcattgttttatattttgtgaaaacacacatggaagatattacccaggtgtgctgaatgtttcccattcctccctccttacatccctgttgacctccaggaggctatccaggaagctgatctcaataaactgcatatgcatacagagttttcatgacctttggcctctaggtggctttgactacaggaggtactcatgaatcacagggtgttatggactgaattgtgtccacataaatgtgtatgttgaagacctatctcacatttcctcagaatgggactatatttggagatggagcttttaaagacagcagtacattcattaaaatgtggcctttggagtggaccttaatccaatataattggtagcctttgtttaaataaaaaagattaggacatgcagggggaaaaaccaagaatgttcctgtacagagaaaagactaagatgaagacaaagtgagaaggtgacatctgcaagccaaacagagagccacagaaaaagccaaaccaggcaacatcttgattccagatcaagcctctagcactgtgagaaaatcagttgttgttgtcaaagcccctgatctgtagtaatttgtatggcaatcctaggaaactaatatggagatcaacatattttttcccaatcccccaactctccctccatgcaggttgcagtttggcagtggctgaagtccagagccacagcttctgttgggcagccctctcccacagacacagttctcattaggtggtttcctttatgaaagcaaaaagtgtctgctgtcttctgttggcttttctgtctaataactctgtctattagtgtctttcttctctgtgtaagcttttatattgtctcttccttaaattctctgcaactgtccctttgaaacatgtgattagttttcttttttttgagatgaagttttgctcttgttgaccaagctggagtgcaatggtgcgatcttggctcactgcaacctctgcctcctgggttcaagcgattctcctgcctcggcctcctgagtagatgggattacaggtgcgtgccaccatgcccacctaaatttttgtattttttttttagtcgaaacagggtttcaccatgttggccaggctgatctcgaactcctgacctcaggtgatccacctacctcggcctcccaaagggctaggataacatagatgcccattaatgaggaaaatcaaggatgtgttttcagggcatagtgttatgttatgataaagtgacttggattcattatatattatatattatatgttatataataatgcattatttgtcatattctatacaccatatcttatatgttatatgcaatatattgtatattttccattatatcactgccagtggtggatacattttgatgtttgtaatataaagtcagatgatcaagtcattagagaggtacatctttttctgtacatcagaggtatttattcacatactggagatattcagttgaatgaatagatttctttattctatgagttgttgttatggtttggctacatccccacctaactctcatcttgaattgtagttcccataatgcccacatatcctgggagggacctggtgggaggtaatttaatcatgggggcagttacccctatgctattctcttaacagtaagttctcacaagatttcatgaggtctgatggttttataaggggctttcccgttcacttggctctcattcttcttcctgccaccctgtgaagaaggatgtatttgcttccccttccaccatgattgtaagtttcttgaggcttccccagccatgcttactgtgactcaattcaacttattttctttataaattacccagtcttgggtatgtccttatagcagaatgagaatggactaatacagttgtctaacaaggtatatttgtgacatataaattctcaaaaaaatagacacaatggaacagaatacatggattcattaagtctccttaaaacctcagcttgaacccagaggttcaagaaaatagggctcttttttactattagaaggaaatcagttttgtcataccagtttctaactctcaatagaagatgtacagtaattttcttttattcgatttaaaacccaactcctagaaatatggcccaattgatgtttttgaacatgaatctacccttgcttctcctctttgggggtctgtctccatttgtcctgcataatccttatgagtgattggagcaagaagaaggaaaatatctgtgcttcccctagagttagtatgattattacttcaccactcatagcacacttaccatatgctgagctctgggaacaacttggggaagcaaaaggaaaaagaaaacacacacatctttgggtttaagaagaaagccagcaaacaaaacaacaaagcaaaaaaaacaaaacacattaatgacataaaattgcacatcccaggtggatgttggtgagggaggagcaaatattctctgatcaagatactaatgattgcactagaggttcaaatagcatccttccaggtggagaaaaactgagttgggttatgcatagaaatcttgtcaggcaagtatttaaaatgtggagggttgtccacaggcaggcattcctaagtactatattaaggtaaaaaggtaggactctagctcacgcctgtaatcccagcattttgggaggccaaggtgggtggatcacctgaggtcaggagttcgagaccagcctggcccacatggtgaaaccccgtctctactaaaaataccaaaaattagtcggtcgtagtggtgggtgcctgtaatcccagctactcagtaggcgagacaggagaatcgcttgaacctgggaggcggaggttgcagtgaactaagatcatgccattgcactccagcctgggtaacaagagcaaaactctgtctaaaaaataacaattaaaaaaaatgtaggattctagtcatcatgaaggggaagatcctgacagaccctcatcctcacaggaaactaaagtactattttagttactggaagagttattccagatagcacccagaagactggggacaggaggtaagaaaactttgccttctcagtacaagattaggggatccaagtacgagagtggaagctgcagcagggctgaactgaagctgatgagacagaatattcaccatttgcttttccactattgcattgcattttaagcatactggtcatcccgggagatatgtatcagggtgatagaagggaagatgcaataatgtcctgcctgaaatggggaaatatgagtggtttaaccacttattgctttaagcctcacattgactgggaactgagacaggcctgagcttgacagataaagaagccaatgcacgtagggggagtggaggagaccgaggctggacagacacttggcactggtaggtgataagatgatgtggaacaaaagtcctcctctcaaagtcattttcagactccagctatcatcattcatccaagaatcattccatatttcagggattcatagaatttatagcaaaggccttcagtcgcctaggaatgtttaaattttgtagcagtatgttttttgagtatgcttacactgacttagtttggccaattgtgttgtgtagtgtaaacaatcaaacaaatgacatggtgggatttctgagcagcactgtctggtatcttgctgatggtgtctttaataatagatggcacttgattttagatataaatacatgaaaatagtttgaatgttgatattgtttactttgactttatgttgctgcaggtttacaaatctgagaaaaaaaatatttctggaaaacataggaactgcattttgttttctgttgctgcatgatactgaataaagaatgacagcaatccatgatgggagcaggtttcagcacatcaaatcatcatcctaccgactgtccaggaacagttattggatgttttcctgggatgtcaataattttgagtgattcataaaccatataaattaggtttcaaaataattacacttgtgtgtacaaagtttgccttcctactggcgggtatcacattccaaattgtaacaaatcaaatagtgtcacaaacatacaaatcaacctataaataatatatgaaaagccataaataataaataccttcttatcgtatctcaagttaacaccaaactcagtttcttctgtgaaatttgtaatttatatttcagtaaaaatcactgtttcctcagtattttataaaaatcgatctgtcatatcttgtgtgtcttagacctcagccaggctccataaaatgaaaacaaagttaaacaacttcacaagagacagaaatggccttttaagattcataggagtgtgccttcttgtctaatctgagcagccatcatggcaagattgatgtacattggctgagaagcgtttcgtgaggcggctgtctgctcagtagtaccagaatggagctatctgtcttcattgtaccccattaacatgcccctcagatctatcaggcaaatgtctgcatacctactttataaattattacaagcgacagttaaatatttcagaacttgtttggggatatcactcaccttatagtttttaatttatacacactcatgattttaaacattttaagttcaaggattacttggaactacttttatattttcactttacatgagcttattctgctgatagtaatccatccagttttgaaaagtgcggtcagtgtattgaagtaaattttaaaaattcaaattattcactaacaaacagcacattttctttaacaattaagtagccaagatttcatagcaatataataaaaaaaaaatgttattcgttttccttttaatgcaaaataattctgaactaaaaagaatgcattcaaatcatgtttatctgaaacttttgctttttaaattacttttatttactcacttaaattttattagcctactgacacacaatatttcaatttgtagtaataatgctttaaaagcccaaggttttactttaataattttagtgtgttaatttttaagaactcaaattgttaagtattattcatagaacaattattccaatgttctcctgaactataaagctactgtacacgagagtgaattggttatagaaatggagacagggagcagatttttttcaatgtaattaaaataaatttgaactgaataaagttcaatgtatttcagatttaataggcattgtatttactaataaaaaaattgcatgcttgaacttacttaaccttggagagtagaggtagcttttcattaatctccttttttaaagttggatgaggttatgtaactgaaatagacattaaaattgaagagacattcttcatggattacagaacagtatttggaaggaaaccaaatcattaaaatatcaccaataaataattaaatttgcttattacattgaaaggacagaactagaataaaatttattgaggctactgtgagccaaaggctttatataaattattatgttatatcttcataatactcttttgtggtagatattttctcatatattaaagttggaaaaacaggtttagggaagttaagtcaatttcaaaaataccaaatgagtaagaagtacaaatcaggatcttatctagttctgtctgactccagtggcagtgatgtgtgcattacatatttgcgtgtgtgtgtcaaaagaagagcaaaggagactttagaagagatgctgattaaagaagatcagaggcagagacgggcggatcatgaggtcaagagattgagaccatcccggccaacatggtgaaaccctgtctctgctaaaaatagaaaagttagccaggcatggtggcgggtgcctgtagccccagctactcaggcggctgaggcaggagaatgatttgaacctgggagggggaggttgcagtgagccgagatcacgccactgcactccaacctggagacagagcaacactctgtctcaacaaaaaaaaaaaaaaaaaaaaagaagatcagaaatatcttttttactttctcttcccatttttttagaattttattgaagtataaatgaaataccataaactgcaaatattgataaattttgatacgtgtatgtctagtgcaaataatgaagataatgaaaatattgcatatctgtcaaccaaaaatatgttatttatacccgtttgtactttctccatcctgcctctttttactacttcctcccactcctaacaacagctgatctgctttctgtcactataagattagttagtattttgtataaatggactgattacaggagccacctttttttctgacttttttcatttaggataattattttgagattaatccatgtagctacaggtatcaaaaatctgttcctttgtattgttgagtagtattccattgtaaggatatactgtaatttgtttgtttatacacttaatggacatttggattttactagttcctggttattgcaaagagagcttcatccttttccagagttcatatgaacctacactttttctcctattcatgcaactcatagcacctatcatatgctatgtgaatgtttatgtgtgtatatataaaaacatatatatacacacatataaacatatatacacatatataaacatatatacatatataaacatatatacacacatatataaacatatatatacacatatataaacatatataaacatatatatatacacatatataaacatatatatacacacatatatatatatttgattaaactctttttggagtagttgtaccattttacactcgcatcagcagtatatgagagttctagttcaaccacatccttgtcaacactttgtattttttcttaattttctttttgaaaaaaatctagccttctaataaatgtgcattgacatactattacagatttgctttgtatttccctaaagactaatgatttccagcctcttttaataaatttatttgccattcgtatatccttttttatgaagagcctcttcatatcttgagcacagttttaaaatttgagtttttttcttattattgtattttacaagtgcatcatatatcttaaataaaatcctttaccgcatacaagatttacaaatattttttctaatatctggcttaaatttttattttatttctaatgtcttccaaaaattagaagttcttcaattcgataaagcacattttatcaattcatttattttttaaataaattatgattttgttgtcttatttaggaaaactttgcctatttcatggtcacacagatgttctcttaaggtttcttctagaagattctgttttagattttaactttaggtctatggtgcatagtaaggataaagataccatgcatatttcctttttttaaaaaaaatggacattaattattggttttgtttgtttgtgttttgagacagagtctcagtttgttgcccagactggagtacagtggcgtgaacacagctcactgcagccttgaacttctgggctcaagtgatcctcccacgtcagcctccccaagtagctgggactacaggtatggatcatcacgctcatctaatttttgtattttttgtagagactagattttgctatgttgcctaggttggtctcaaactcttgggctcaagtgatcagcccacctacgcctcccaaagtgctggaattacagcctgagccaccgtgtcggccattaattgttttaccactgtgataatcagccttatgtgtaaagctgattaagctatagttcctaattattcaatctaacatctaagttttgttcaaagacgtttctgtagatattattaagtgaggaagatgattctagataatcacggtgggcctgaatcagtcagttgaaaagccttaagagaaggcgggagttttccctgaggaggaagccattctgcccatggactgcaacctcagctcatgtctagaatacgtgaagtgtttcagcttgccctccctgacagccttccctatgccaatgccttgcgataaatctctgtcctctctctctctccttcgctcccaccttctctctcccacttacttaccctactggttctgttctctggtggaacactgactgatgctaccaccgtttcctgaaaaagattatttcttttctccgtaaattgcctttacatttttgtcgaagatcaattgtatgaatatgtgtaagtccattactaggctttcctattttttgagactgagtcttactctgtcacccaggctagagtgcagtggcgcgacctcggctccctgcaagctccgcctcccaggttcacgccattctcctgcctcagcctcccgagtagctgggactacaggcgcccaccaccacgcccggctaattttttgtatttttagtagagacggggtttcaccgtgttagccaggatagtctcgatctcctgacctggtgatctgcccggctcggcctcccaaagtgctgggattacaggtgtcgccactgagcccggccgtccattactagactcttatctgttctattaatttgttggactatccaccactacctaccatgctgtcttgactactgcatttttatcatatatattggaatcagatagcataaattttcatgggagagaagctgagataattggtttgaatctttttgttcttttctaatattgattttcattgttaaaaatacacctgaaaatactgacttaactgaatctcacaaatatatacatttcagaaatatatattacatatttaaaaattagataagtttggttgataataatgctcatttctaccacattgctactagttttctatatgtataatgtttattattctcccttttctcgtttcctaggaaataaaaacataaatttagaactctttatccaacacaagtttttaaaaaaatgaatgtgttgtaaaaccgatgtaatgacttaagatttaagtctttataaagactatcaaacatatatagattggaaagagtcatcacttgcagagcaacactataagaaatggtaataaaaaagctttaggcaggaaaataataccagataaaatgctttaaaaatggcaaacacataagcatataaaatatctttttatttttgtttattcaaaagataactggatgctaaaaaataatgacaatgtattcttgacacaccaaaataaaaattgtgtcataagaaaagaaatcagctttgaccatctaccatacccagagaacaaaataaaacatgactgtgtgagttaaataagaccttttctgcttcacacctatccccacttccaaaactccctggagcgtgttgttgtttttgtttgtttatttgttttaagaatgtccaaaatacacaaaatctatcagaaatttaatcaagtgacaaggaagaaataaaatgagtacaagtccttagtgggaaattttaaaagttgtttgtgaatgtatcctatcaagaagaatcaattcaacacaatgattttgtggattttggaatgtttaataaaactatataccaaagcattaaaaatgatgtattaatggagcaaaatgaaggttattttttctattttactttatatatttgtgtactctttggggtatttttaaaaacatttattaccattagaatcaaaattaaagatatttcaattatttaaagttataaaattgtatttaactttttttgtcattatctgatggtgatctaaaagcagtgcttctcaaaattgtatgcattagaatcacctggggagttttctaaagcaaaatgtgctgtaccccattcccagagtttctggtttcagtagaatacgggatggaacctgaatacatccaattttaagatgtcatcagatcatgttcatgttcatttaagaatcatactttatgaaccagaggactgcagtatacatttgatgtgtcctttgtcaagaaagtatcaaggatgttgatcaagttatacatatctaagcatataattgtccttcagcacacacaggggattggttccaggacccctgcctatattcaaatccacacatactcaagtgccacaaaaagccctctacatatgcaggtttggcttctcgtgaatactattcattcaatgtttggttgaaaaaaaattcatgtataagtggatccacacagtttaaacccatattgttcaagagtcaaccatatctcaattttgttattgtacaagtgttaacagaagttctctgagaaggaatatggagaaacaagactttaatccagtgaatagtttggaaacctgggagatgcagctattggtggaaaatgaagctaacagtctagagaacaaagacagggtttggttttatgttaaaagttctcaggcaggttcccaatctgttccatttatgcaaatgaagaattcaaacttgcttagttcggattttgacacagctgagtcctgattggttgatacagttgagttctgagtgggtctgtctaggcagatgtgctctgactgattggttcaggtgagctctgattggttggtttccaagtccaaaaacagatttctctgccagatgttttcttcagatgacaggtgatatgggattccagcagcagcttatcttggcactaaacacagaaacttgtttggcttaattgtaggaagtgaggtcctgtgatactttacatctttttaatctttctgaggacacagagtatgtgactgctccctcagtcagccatggggattttgtctgttggccagggtacttggggcagattttaacataagtgaaataatttggctgagcatattaaccttgagtataatctcctgtcagtactctcataacatttatttttttaaagattgccattgtttgaactagtgcacttttttttttaactctttccctggtagaagttctgatatcccttgataattctcattcccggtgctatggacgggtctgattccaccttaatgaatgagaatgtgcttctcagtctgagccaatccagtagtgtgccatcaagccaagtgcatttggttcatgagctgaaaaattatccaatccagacccattaaagtagtgataaacaaatccaggacttctgaagctttctgattatggtatcaaaaattcaagatgaaatccaaatagccctgacagccatgtttcatcatgtagagattactgagaatgaaaccacaataaagaaggtagaagggaaaagacaaagttgtgtgtatgtgttgagggggtggggagtgtgttgtatgcttcagatgcagcaattattaaaataccctagtttttactcagaaatttaaatcatatgactaactagagcatctctctccttctccctcaacctttatttatatttattttattttctatgtagttatttaaaacaggatttttatcactttcagtgaagtattctagagaatacggattgattctggtttgtatcatttgaaatattaatctgtttcttattgaagtctttaagaaatatgcattttaggaaggacattttaacaaatattatactaagtattatgtctacttaagaaatatttttatgctgcattattttacagctcagtagatatttttccctattttactattcttatttttttccaggatatttcttatgtaatttctgtggcacttacatactatttattttcttgttttcatatatttcatattctcattgttttaagtattaccatattgttttctttcttttttgtgtgcgtgacggggtctcactctgttgcccaggctggagagcagtggcacgatcttggctcactgcagcctctgcctccgggttcaagcaattctcctgcctcagcctcccaagtagctgggattacaggcatctgccaccaagtccagctaatttttgtatttttagtagagatggggtttcaccatgttgaccaggctggtctcaaactcctgactgcaagtgatacgcccacctcggcctcccaaagtgctgggattacaggcgtgagccaccacacccggccttaccatattgttttcttttagcaggttctcatgagtatctcttctagtcaatatggttttcatattattatttctgattctaaagataatcataaatctgatttttaattttaatatttttattttatttcattttatttacttcattaaaaaagcaagcgattactttctaaaatgttttgatttctaagaaaaatgctttttgtacataagctttcacgtatctcctccttttatgctgtgaaatatttttcccctatgtcaattcttaaacatatttgaatcacattttttttacctcaaggtaaaatgcctgtattctgagaaatttagcttctctcaagttgcctttagggtactccattcaaatttgggttgggacttggtaaatgagtacttacctgacaagtttatcattctacttgtttgtaatgaataattttaattaaaaattaatgtcacaagcaaactgcttccctatttcacacatttcacttcatatatacctaaaataggagaaggaaacaatatctatctcctggtttcttgtaagtgaattgtaaataaaattaaatataatttaatgcattttctattgcaagttaaacgtctagtttattttctttctctacttccattcctagaatatagaaaatgataaaaagacacatctatattatcttttacaaatatttgtacccattttaatattgaaatagtataaatgaatcataaaattttatgcatatcattcaaattactatgctttagaatgcttttggtgatatgacacattgctttcggactgataatttctctcagaacaatttatttccattagagaataaactccttgcatgtatatattaccatataaatggaattcttcataccctttattgaataagtcatcttactactatataatttatatagaaatgtgtcttatgatattgttttgaagagtttggtttaatgttttactatacatatatttatttcaatttccttacttagatcaagttcatgggggggacaaaacagtatcaataatttcctttacaaaaatgcttttctagatcaaaatatttataaataacttacataaggtagttcataattcttaggtaaatatgaataataaaaactgtatgcaaatccttcagttttactgttctataaaatcacaatggaaatagatttgattagtgaattggaaaaatgttaaccaagtaaaaatgctggcctttcctaacgtatcttcttccacatagaaaggattttatgaaaaacagagcaacatagcacatcaaaattagcaattcaatagtaaaataatttaactgattaattaaaatacataatgtacacgttttgatattaaattggatacaaatgtaaatgatgtacaaggcttcatagttgattttcttagcagtgcaattatacattttgtaatatttaccttacacctaagcctctagttcacattttaaaattattgtatcagtaatattttccctcagggtccactatcaaagagagagctaaaaagaaatttgatcttttttcataaaaaatgtgaattgtgaataaacttttaaatatagtacaataggtttaatggtaggcatatataatattaatttctgggtaaaaagggaaacttgaaaatattttataagctaagcacataattagtagtagttatgtttctttatcatgtaattaattgtgagagaaaaaaataatttccaaatgatttatgttcattacagcattccctcctttccatagaaagttgacccttgaacaacttggagctgaggggcactgattccccacacagtcaaaaatctgcatataagttttgactccaccaaaacttaactactaatagcctactcttgactagaagcctgaccaataacattaagtagtcaactaacacgtatttgttatgttatacactgcattcttaaagtaagctggagaaaagaaagtgttactgaggaaatcataagaaagagagcatctgtttactattcattaaatgatagtggatcatcataaagatcttcattcttgtcatcttcacactgagtagactgaagaggaggaaaaagaagagagattggtcttactgtctcaagggcggcagaggtgggaagagaatttgtgtataagtggacccacacagttcaaacctgtgttttgcaagggtcaactgtatactaagaaaagttactttaaatattttgatgtggtttcaggagatgaattatgctaatttaaagttaagattttagtcttgaaaatagaaaataattcttggaaataattaaaataatgcataggtagaaaaatactatattcttttactcgtttattttgcaagtgttttcaacatgctcattacattcctgcaaggtcagtgtggcactttacatatagtatccctttaatatcattttttcagcttttattaggaaacctgagggcaagcatacttttatgtgaatagaattttgaagcagtgaggtgttataattatcttcaaatgtttcatctttactctctcccaatttacataaaatgctattaccagaatcacatttttagtagagttctcccagtatttttattcaaaagagtatggtcttttcaacattttggaatacttagaagaaaatataaaactttagcttccaatctgttattatcttgctgaatatttctgatatatttgatactggtgatcacattctttttccttaattccattcacttccatatcaacacacattctggatctgctcctaactctctgaacaaatcttaaatgtagatacagcttagaattttagccttgctttaccattctctaaattcattcctgggacagtatcatccactctcacagttatatgacttacattgatatgttcaaatttgaaatctctatctccattcatatccttttccagaattttggatccctgaatccaacttctcatttgtcaacttatattttcaatggtacaatttgaggtacaggtatcttcaaagttaacgtagcccaaatcaaaatcacattcacccaagaactagttttgctgccccttccctatcttagttatatccatcattcttttatttttccaaattgtaaacctaagaagtatccttggagcaccatcccccccctttttttttttttgaaatggagtctcgctctgttgcccaggctagaatggagtggcatgatcttggctcactgcaacctccgcctcctgcattcaagtgattctcctgcctcagcctcccaagtagctgggattacaggtgcctgccaccacgcctggctgatttttgtatttttagtagagacaggtttcaccgtgttggccaggctgctctcgaactcctgacctcaggtgatccacccacctcggcctcccgaagtgctggtattacaggcatgagccaccacacccagcccctttcttattttatacattaactaatgcatcaagtttttattttacttccaagtaattctcacatctgtcacattctctcaaattatactcctttggttccagcttaaactcacataacctcagacataaaatatacttattgtctcataaccattctttcaatatttacatttcagcattattttcagctaggttgacctatgtgaaacacaaatttgataacatttttcctcatttgccaatactctatagctccaactctactttaggattaatcagtggcctcttcgcttgaaaaaaaaaaaaaaggatcttcatgacatttctgagaattgctatttttgccttattttctctctctgaacacactttacactccagcaacactaatatgcattatattctgaaaaaataatgcaatgtcttcttttagcgactttactaacattgttaattcagcttggaacagcgtttcttccagttctttgcgtaattcctaattatccatttcctcccttctttgtaaaactgcagttctgataatggctaggaaaacatgtcctacagtgctaggaaggcctataatgatgctttgacttcatctgtgtcaaggaggtaaggttgctagatttaggggaacaaaaaataggattctgaattaaatttgaaattcagactagctatggcttttaatataagtatgtctcacatgatatgttggacatacttatactacaaatttatttgttttttacatgaaattcacttttaactatgcatcctttattttatctggaaatcctacaagcatgacaaaaggcattgcagagggtggagaaaccaacacaaacacgataggcaataggagttgaaaatctggcccactgttaagaaatttggtgagaggccgggcgcggtggctcacacctgtaatcccagcactttgggaggccgaggcgggcggatcacaaggtcaggagatcgagaccatcctggctaacacggtgaaaccccgtctctactaaaaatacaaaaaattagccgggcgtggtggcgggcgcctgtagtcccagctactcgggaggctgaggcaggtgaatggcgtgaacccgggaggcagagcttgcagtgagccaagatcgcgccactgcactccagcctgggcgacagagcgagactccgtctcaaaaaaaaaaaaagaaatttggtgagagaaaaaaataccaaatgctttttttcctgctctaataaaaaagttccaactgtacaatcttggcaaaagttatggtgcaaaccattattgctattgattagtgaacttatatgcaagccagagacaaacattgcagtgatgtttcaaatcagcctattccttctctccagaatccaaagtttatataccaaggcttgaaaggacaggcatgctagctctgatttctagcacattcatgaatatctctgttatttagctaaaaatgaaagtaggaacttaggttggatctagttattgactttgtttatttattaccataatttgcggtagatcattctgggtgatggcagcagcccatctgcttggacaacgttttctttcttccccttttacaactttattgaggtataattgacatacgataaaatgtacatattttaagtagtctgacaaatccttatgcacatggaaacatcaccatcaccacatcaagataatgaacacatccataattttgatattctttctctaattccttatacccaggcaacaaccgatttgctttttgtcgctatgttttaaatatgtagaatatatattattctaaatatattatatatataggactaataagtatctactgtataatgttttgtattatgcagtattattcaacaaaattattttgagatttatccattttattgtttgtataaataattcatttatttttattgctggaagggtacataattataagtggtgtgtgcttcaatttgtttatccactcacatgttgatggacatttggattgtttacaggtttaagatattacaaataaagctgatacaaacttcgtgtacaatccttatacatgtatggacctacgctttcgtttctcttgggaaaatacttaatactataatcatttaattatactatacatatgtgtttgagaaactttcaaattgttttctgaaaggcttgtaacattttcattgccactaacattgcataaatattccagttactctacattcttttcaatacttgaaattcttagtctttttaatgttagactttcaagtatgtgtggttttactttgtattttcataatggcaaatgatgactatctcttctcgtgcttatttatgatctgcaaatctttggtgaagggttgtttaaatctgttgcacaatttttagtgatttgattcttattattgaatttgttaaactctttacggattgtggatatgtttttcttcagagatgtgcttttacaatattttctaccaatttatagtttgtttttaattctcttgacagtgttttgcaaaaagcagactatcttaatttggggtgacattcttattttcttcagtggaaactcctaattaaattaaataacatataaactttttgacctgacactattgctttattttaaaaggtaatgtagagctacacagctattttggaaacaccaatatatgtatttaaaatcactgaggtttcacaggttgaaatatacacaaatatagaaattaggcacaggactatcagatgtcagaattattatacaaataatatgctgcagtactcatgcttctatctttaacccaaatggctaatatttctctctaaattattagtacttattcacatatccaaccagtaacagtggagaagtgcaggcccccaataaagagacagaaaacaatttgattatactttatctatagaaagccaggtctaaaagtttgtggataaaggagttgacagccacttccttcatcaatcaggtaagtcatcccttcttccattttcagtagttgtgatggttaatactgagtgtcaacttgattggatcaaaggtgcaaagtattgatcctgggtgtgtctgtgagggtgttgccaaaggagattaacatttgagttagtggtctggggaaagcagattcatccttaatctggtggacagaacctaatcagctgccagcgaatgtaaagcaggcagaaaaacatgaaaaggcgagtctagcccagcctcccagcctgcatctttctcccgtactggaaacttcctgaatcgaacactggactccaagttcttcagttttgagactcagactggctctccttcctcctcaagcttgcagacagcctattgcgggatcttgtgatcatgtaagttaataattaattaccatatataatatatataatattttatatatataaattttatatgtataaatttttatataatatataaatatatatattatatgctgcagtactaataggatatatatcctattagttctgttcctctagggaacctagactaatacagattttggtaccaggagtggttctagaggaacagaatattaaggatggagttctttcatcggttttggggtgtctggagtttgctgcttaatatgattagactcaaaatgctaaggactctacctctaatagtatgaagaacactgatagtccttggtgtgaattgtttagagaggtatgcaaaataaatgcatttgacactcctgattgactgctcatgataggcaaggagtttagtgactctctacacaataattttgaccaagtatggaaaaacaaggaacataatgaagctggttggttactcctaagttcaggagacaaagtgatgaaagaaaatgatcaactcagggattctgtctccgggcttcagaagcagatactgagcctcaaatctcctaagattgccctgagtgagagtcttatcttctgtagagaaatagctgaaattgtggaaaaagagacacaagcgcttaccacgcgagtggctgacctgcaacaaaaggtgcacacacagcctcgccaagtgtctactgttaaagtgaggacattgattgaaaaagaacgggaccctgcaacttggaatgggaacacgtgggaggaccctgatgaaactagggacactgagtttgtaaactctgatgaaccttttttgccagaaggaacagcttccccatccccagtagtggcaacatcccctccccaacccatggtaccatcaccctttccacctttgtctgaggaggtaaaccctacactgcctgaggcaacagtgatgggctttcctgaggcagttgccaggcaaaataacgttgattctcctcaggagtcagccccaatgcccctgtttgcttctagacctataactagactaaagtccctatgggcccctagaggtgaggttgagagtgtgacccacgggaggtgtggtacactcaagaagaactgtttgtgttctctaatttatataaacagaaatctgaagaacaggcatgggaacggatattaggagtatgggataatggtgtaacaaacatagagttgaatcagactgaatttattgatttgggcccactaagtagggactctgcatttaatgttgcagctcggggaattaaaaagggttctaatagtttgcttgcttgtttagccaaaatatgtattaaaagggcccactgtgagcaagctggaaatgcctgatctcccttggtttaatgtagaggaagggaatccaaaggcttagggagattggcatggtagagtggattagtcactttagacctacacatcccagctgggagggtccaggagacatacccttgaccaatgccttgcaaaatagatttatgagggcagcacctgcatctttgaagagccctgtaattgcttttctctgtatgccagatctaacattaggaaccatagtcactcaactacaaaatttaaatacaatgggaataattggatcccgaggtggcagggaccaagtggagccactcaaccgtcaaaggcaaggtgggtgtagctacataatggacagcagaggcaaagcagcaatcagaatagtctcactcatgtagagctctggcattggctaattaatcacagtgttccttgcaatgaaattggaaggaagcctactgcatcgctacttaattcatacaagcagaaaacttctaggtcaaatcgagaaaaggctaatttgaatgataaaaacagagaatcgtggcccctcaatcaatttccagatttgagccagtttatacacccacaaccccttgaatgtaggggaggctgggtccccttgaggaaggactttactacattactgataatttttatcagggaatctttctctcatccttccccaaggagacttttgggcttttaccagggtaactgtgcactggagaaagggaaatgatcagacatttccaggactattggacactggctgtaagctgacattgattccaagggatccaaaacatcactgtggccctccaactaaactaggagcttatggaggtcaagtaattaatggagttttagctcagggccacttacagtgggtccagtgggtccccagactcatcctgtggtcatttccccagtgctagaatggataattggcataggcatacttagcagctggcagggcccccacattggctccttgactgatagggtgagggctattatggtgggaaaaaccaaatggaagccattagatctgcttctacctagaaaaatagaaaatcaaaaacaatattgtatccctggaggtgaaaaatacttttcccgcccgaatgttgccttttccaaaaccaccctggcctgcccgccacccacatcctgtacccataaaagctcaaggccccaccagcagagtggcagagcagcagagaaagagtgaagagaagaagcagctgggtgttggagagaagcagcttgacttcagaggaatggcttgatggcgggactccggaaaagagtttggtggtccccagtgagagccacttcccgctgacagccacttccgctgttcaatgaaatcctcattcaccaccatgcaatttgttcacgtgacctgattcttcctggacaccggaaaagaactactcctgccggggctcagaagcacttgtcttggccgctgcacccactcacctgactgttcacactggaatgaggggttgagaccggcaggctgagtaaatgagccaaccccgttataagtctcatgaaggggtcaggggaatgatcccatttcaatatcactggcagataccaaattgcaagttgttggagattgtacaaactaacatagtattttgtatgtagaaggaaatatgcatttttttttgaaatttatgatagaaatctagatgaattgcattaatagccaatgaaattcatggtgaccattagagatatgcttgagcttaggaaagcagataattttcaagttaggtgtaccttccctactgtaaggcccttggatggggctgaaaaataaggtacttaaaattgttttcctgttcctgtggtccttcaaattggaagttgaaatcttcccaatttctgagtctgggaatgagacgacatatgtctttgaggggaaaaaaaaaaggacccattaatatttgggtactttttcagctatagcccaaaataattaaatattacgtatttggagtgaacagttttggcttcaaaaaccaaaaactattaaaatctagcatatgagaaaagttttgtttttttgttttttactttttgctgtcagatgccaaatcaaacttgttatctagaagagagggaaaaatctagaatagcaacaatatgttcaaatggaaaaaaaaaaaaaaaaaaaaaaaactctaccgaaatttagcaggcagaaaatagaagcaagaatggaggaatcagatagatacagccacactgctcctaaaggagaaaatctgatcaagaaatttatccccttgggcttgtatttttcaaaaggagaaatttcatgggtctgatattcatgaatgcactcattactgttacttacgtttgttgaagaaagattcacattttaataaggtaaccaaaaaagtaaacgtaagctatgtaccaaatgcattatataccttaacttcctttaagaaagtcataaggttgatctgattaatctatatatttaagatagataaactgaggtacaaagaaattaaatagactgtctaatgtaaaattaataagcaaaagcaatgagattctaattcattcatcaacaaaacaagagcctgagtacttatccacaatgcttattattgactttcatcattatcattatcaatcatcatcagttgtatttactgtctttactccttacacagttttatttcatccttgtgtttataaagaggagaagatgcatggaatagcccgtttgctctccctatgctgacagtatgctttcaacactccttaggcttgaatgtttgccacagacaataaagcaggtgatagatgaactcttggctttcctgggatgtaaaataaactgtactgagtctgaaaatatcaacatacaatatgaatgatgcgtccttgcaggctagtttgcatttctatcagcctcaaattggttcttattgttgagccataaatatgttacaatattgtttaactgtcaacaaagtgtattttcttgctaactgagctaaatgtaaatattcaatattattgcccaattatattttgttcatgacattgtaaaatctaacaatatatttttgtaataaaaattatatttgcaaaggcatggtgaatttatatatatatatatgtgtgtgtgtgtctatacacatatatataatatataaatgtttcaatatatgtcaacataatctaaatcatattcctagcactatttggtgcttactcagtatttgttgactgaattcatacatattccatgcatgccttcattttaagtctaactttattttttaacaatactgacctcttaatggaaaaaaagaactctcaaaataagttgcatgcaaagaataaagatatacatatttatcttggaaaatgcagcacgaggctaacagagcacagagagaagtaagacatattatcttaatttattctgctcttaattttctgtacttttttctatttcaaatgaaaaaaacaaacaaacagaggaaatcttgacaaaagtatgaaatgttcatggaaaagaaacacacaaattttcaagttactccagtaaaacatgggaatggatgaaatgttaggtgggcattagctataatagacatgttttgtttctagaagcaaaacaaaacaattgagtaatggatacatatgtgtctcattatttttggtacatttatgtattttcagatatattttcattttgaaataaaacattagaaaataaaaatttatgatgtatgagaaaaatactggtatattatatataatgcatttaaatctaaagccagacaaatgtattatataggtaattttcaaatgagcagtaaaaataattctttaaaaaaaagattatttttttagatgtctggtactaaaaattcagtagggctctttaatccttatatgagcattgtcagcatttgcataaaatcatgtcaaagtatttgaaaaaatgtcatcaggatatgaatatgtataccagaaaataaaaaaattcaaatgagacatgacttttgaagtgaaaaatatagtaaattatttaatcaacctactcagggtaacaggatgatcactgaagaaaaatttacctgtgagaaagccacaatcagtgattataagaagagatgaagaatcatatacttagcagtcatgacattaaaatttctatgaggtataccatgtcgcattacctaagtttaaaatgtccatatgtctgtaccattcacaaagaatctttgtatgtgctgaacctgtctgctgactgggacactatgtcagtgataccaggtttacccagagatgagaggtgttaatagtataaactcagaaatgaagaatataaagtcaatcagagggaaaatatggggaagttgctacataaagcaggaacaggaaatacaaagggcttaagagagatgaatcacttttacacaaaacagcaaggaagctgttgcacttcaatcgtaataaacagtggagaggggaagagaagtataagagatggctgagttagcaaggggccaaattatgtcagccatgatatttagttgtataggtatttttaaatttggaatggagaggctattcaaaggttttaagccaaagaagtgacataatctgaagtatattttcaaagtttattttagctgctaaagtgaaaaaatggagaccaacagaaaactatagcaagtagaccagatgaaaatgatggtgtcttggaacaggattgagtgaacaaggatggaaaaaaaaagcaaacagattgaagatatatttaggagctacaatatgagaaaagcagtcgtgtccttgatgggtgtggtaagaaactctctttatttatcagtcatgcaggtttttttaaataaaacacttaaccatttgtttattcattcattcattttacatgtattaatcactcaccaggtgttggacacctttctacatcagtagtaaaacagataaagatccctctgtcattctagcacgaagagatgagtagcaaacacaaaagctaggtaacatatttactaagtaaattacacagtatggtagagagtaataaatggggtgaaaactaggtgagggacatggtgagcataaaataggcaagccaaagaatgaaagagaatgatcagagtgggctttattgtgcagatgacatttgagaagaggattagatgaggtgaagaagttagctacatacgtatcagagggaaactcaaattaggcagaagtgctaggaaggacaaaggccctaaactgacaaaggactagaattttaacaacaatcaatccaagcagagtcagtgtgccggaagcagaggaaatgtggagaaaaataatagaatttgaggtcagagtgcacaaagagaggggattatatcttgcaggtcactttaggccattggaaatactgggagaagtggaagccattataagattttgagtagatagtgaaattttcaaacatttcaaagaatgcctctggctgctgtgtcaagattagattctagtaaggcagtgagaaactaaaaacctgacccaaagattatttaaataatcaaggagagaagggttggtggtttcctctaaggaagtaacagtggatatgataataagtaatcagattaagaatgtattttcaagagaggagagtatttcctgttggattggatgagagtaagaaagaaagtagtattaagagggtactatttattatttgtttattttggctgcccttattttaaatgagaaagttctggagggattgagggtttcttttaggaataataaaagaaaaatggttcaactttaaatacgctaaatatctgaatggagcggtcagtaagtactttatacaaatttgcagtttagaaaggtttgaatggaagatataattgatggggtcattggcatacagctaagaatgaaggctgtaagacttgagaaaactaagaaagtgtgtagacagtgcccatatgtgattcttgattatgaatttaaagtgagaccacttaacatagagaatagatggaaagttggatttggatcgggctgtgataaaatatgagcaaaggagagcatagcaaagtgcaggcagaggacacatttctagctgtgctccatgtactttcaccatttcttttttttcttttctttttttttttttttttttttttgcttagcagtaccatgttgcccaaagccaactttatccgtctcacctaaattaatttctggaaaaagcttgacactcaggtgtggattttctgattttcagttttgaggggattttcctttgtctaattttatttctaatacagtacactaataggaaggtaaagtgaaattaaaaagtagttttatctcttctcttttaggtaactacatctcctggcaaagctaggaaaagagcaaaaataaataaaagcgtagctctcatcaataaaaaaaagctacattattttcttcaatgcctgagaaaaagattttctagcatttcataacataaataagaatagaagaaaagctattaacgttcttttagttgtctctctgtgtgtgtacggtgtgtctatttttgtactgagaaataaaaataaaatccaaagcaacccccactgaatgaatggacctcctctaagtcaagaagacctcagagaaacctaaaggaaaaaaaaaaaaatgagttcctggccgtgatgagtaggaaatttcagacaggcatgtgtgtacctcccctttgtgaatattcagagccctttctataaactgttgaatatgtatatgtagccaacccatttggtatatcttcctgtctcatgcttcccacccttgaatcactttattttcctgcctgcaggatgtgaggctcccctttagaaataaaactctccttttcaaattggtgaacctcatgattcttcacttggcagtactaaagcaaactacccttttaaagatatttattttagaagcattttttaaaaatacaaataatgccactaaaaataacctcagttgtgtgtgtgtgtgtatgtgtgtgtttgtttgtttgtttgttttgagatctgaagcctatatttgaacaatcttactctatggtatttttaggatagtagcattttatccagaagatgttactagaaatattttgttagcaaatttctgttaatttttttttgtttttcagcctataaaataacaatcttgtggttcatttcacatattaatcttagaagatcttaaatataaatgaaatgtggacactagaattcaaaaaatgtaaataaatactactattcattacacacagaaacgtctgacattaacgtgtgatgccatcatagaaaataatgacgactccagtatttcctgatccaggtctgaaaacagagtttgtcccactagcactattatgccactgtttttacatttttccaggccttatcatactcattctagaatgcctgagcagcaaatttcctaaattcactctggtatgggcaatgtttcttttttgaatatgttgagtaaatagaaaataaattgaaatcctgtagaactgtgctccccaaactttttggcaccagagactggtttcatggaagataattttgccatggacaggagttaggtggggcatggttttgggatgaaactgttccacctcagatcatcaggcattagttagattcccataaggcatgcccaacctagatccctcccatgtgcagttcacaatacagttcacactcctgtgagaatctaatgctgctgttgatctgacatatacatagtgtatggtgtgtgtgtgtgtgtgtgtgtgtgtgtgtgtatatacatatatggtatgcatgtgtgtatatatatatatgccacatttctttacaaatttatactgtattcaatggtatgtttatacatatatatatacacacactatatatatatatacacacacacatacatagatatatacacatatatatatatagatatatgccacattttctttatccactcattggttgatggacatttaggctggcttcatattttcgcaattgcaaattgtgctgctccaaacatgcatgtgcaagtgtttttcatataataacttcttttcctctgagtagatatcaagtaatgggattgctagatcaaatggtacttctactttccattctttaaggaatctccatactgctatcgctagtggctgtactagtttacattcctactagcagtgtaaaaatgatccctttttgccacatccactccaacttctatttttattttttattttttaattatggccactcttgcaggagtaaggtagtattgcattgtggttttgatttgcattttcctgataattagtggtgttgagcattttttcatatgtttgttggccatttatatatcttcttttgaaaactgtctattcatgtcctctgcccacttattgatgggattattattttttcttgctgatttgtttgacttcatttagattctggatattagtcctttgttggatgcatagtttgcaaatattttctcccattctgagggttgtctgtgtactctgctgattatttattttgctgtgtagaagctttttagtttagttaatttcccatttatttatctctgtttttgttgcatttgtttgtgggttcttggtcatgaactctttccctaagccaatgtctagaagagtttttcccatgttatcttctagaatttttatggtttccggtcttagatttaagtctttgatccatcttgagttgatttttgtataatgttccattcttctacaggtggcttgccaattatcccagcaccgtttgttgaacagggttgcctttccccagttgaagtttctcgtttgctttgctgaagatcaattggctctaagtatttggccttatttgaacgttctttattctgttccattggtctacatgtctgtttttataacagtaccatgctgcttggtaactgcagccttgtagtatagtttgaaatcaggtaatgtgatgcctccagatttgttctttttacttagtcttgctttggctatgcaggctctttttttgtttgtttgtttcatatgaatcttaggattgtttttgctagtttcctgaagagtgatgacggcattttgatgggaattgcattgaatgtgtagattgcttttggcagtatcgtcattttcacagtattgattccactcatctatgagcatgagatatgtttccctttgtttgtgtcgtctataatttctttcagctgtgttttataggtttccttgtagagagctttcacttctttggttatatacattcataagtagttttcttttttccaaaaatacttaaaatcccttttgtaaaagggattgagttcttgatttgattcatggatttgtccctgttggtgtatagcagtgctactgatttgtgtatattgatgttgtatcctgaaacttcaccgagtttatttatcagatcgaggggctttctggatgagtcttcagggttttccaggtatatgttcatatcatgagtgaacagcaacagtttgacttccactttactgatttggatgcccttcatttctttctcttgtctgattgcactggctaggacttttagtactacattgaatagaagtggtgaaaatgggcatccttgtctttcttgttccagttctcatgggggaaggctttcaactttttcccgttcagtataatgtaatagatggcttttattaccttaaggtatgtcccttctatgacagttttactgaggtttttaatcataaagtgaggctggattttgtcaaatgctttttctgcctttgagatgataatgtgatttttgtttttaattctgtgtatgtggtgcatcacatttattgacttgtgtatgtgaaaccaaccctgcatccctagtataaaacccacctgatcatggtgttggattcagttagctagtatttggttgatgatttttgcatctatgttcatcagggatattggctatagttttctttttttgttatgtcctttcctggttttggtattaggttaatactggattcataaaaaggtttaaggagaattccatatttctctatcttttggagtaatttcagtaggattgttaccaattcttctttgaatatttgatggaatttagttgtgaatccatctggtcctggactattttttgtgggcaatttatttattactatttcaatctcacaacttgttattggtctgttcagagtttctatttcttcctggtttaatctgagaagattgtatatttccaggagtttattcatctcctcttggttttctagtttgtgtgcatgaaggtgttcacaggagccttgaataatcatttgtatttctatggtgtcagttgtaatatttctcatttcattttcatttagcttatttggatcttctctcttcttatcttggttaatctcgctaatggtctctggattgtgtttatcttttcaaagaaccaactttttgtttcaattatcttttttgttgttgttgttgtttcaatttcatttagctctgctctgctcttcattatttattttgttctgctgggtttggattgttcttgtttcttcagttccataaggtatgaccttagattgtctatttgtgctctttcagaccttttgatataggcatttaatgctatggactttcctcttagcaccacttttgctgtattccagaggttttgatagtttgtatcactattctcatttagttccaagaatttttttatttccttcttgatttcattgttgacccaaccatcattcaggagtagattatttaatttccatgtatttgcatggttttgagggttccttttggagtggatttccaattttgtttcactgtgctttgagagagtacttgatataatttcaattttcttaaatttattgagacttgttttgtggcctgttaagcagtctatcttggaaaatgttccatatgctgatgaaaagaatgtatactctgcagttgttgggtagaatgttctgtaaacatccattaagtccatttgttctagggtatagtttaagtccattgtttctttgttaactttctgtcttgatgacctgtctattgttgtcagtggggtactgacatccctgcaactattattgtgttgccatctatctcattccttatgttcagaataattgttttagaaatttgggagccctggtatttggtgcatatatatttatgtttgtgatatttttctgttggaataatccttttatcattatgtaatgtccctctttgttttttacggttgttgctttaaagtctatgttgtctgatgtaagagtagctattcctgcttgtttttggtatccatttgcatcgaatatcttttccacctgtgtatcttaagtttatgtgactccatatgtgttaggtgagtctcttgaagacagcagatacttggttggtggatttttttttttttttttttatccattctaccattatgtatattttaagtggatcatttaggccattacattcaatgttaatattgagatttgaagtactgttctattcatcatgctggttgttgctgcttgaatactttttttcattgcgttattgttttataggccctgtgagatttatgttttaaggtggtcctattgtcatgtattttgaggttttatttcaagacatagaactctttttatcatttcttgcagtgctggctttgcagtcgtaaattgtctcaacatttgtttgtttgaaaaagattttatctctccttcatttataaggcttagtttcaataaatacaaagttcttggctgatagttattttgtttaaggaggctaaaaataagaccccaatcttttttggcttgtagggcatcttttgaaaaatctgctgttaacctgataggttttcctttatagactacctgatacttttgcctcatagctcttaagattctttccttcatcttgactttagataacctgataactatgtgcaaaggtgatgatctttttgtgattaatttcctaggtgttctttgagcctcttttatttggatgtctggatatctagtgaggccaggaaagttttccttaattatttcctcaaataaattttccacacatttagatttctcttcttcctcaggacatcagttattcttatgtttggtcatttaacataatcccaattttcttggagtctttatttattaaaaaatttttttgtctttgtcagattgggttaatttgaaagtccttgtctttgagctctgaagttctttcttctgcttgcccaattctattgttgaaactttccagtgtattttgcatttctctaagtgtgtctctcatttatataagttgtaactttttatgatatctatttctctggagccttttacatccatattctgtttttttttttttaaattctttaagttggttttctcctttctctggtacctcttggagtagcttaataatcaagcttctgaattgcttatctggcaattcagagatttcttgtttgtttggacccattgctggagagctagtgtgatcttctggggttgttatagacccttgttttgtcatattacgagaattgtttttctggttccttctcatttaggtagactctttcagtggaaagatctgaaattcaagggctgctgttcagattttttttgtcccactggtgatcccttgaggtggtactctcccctttcctctagtgatggggcttactgacagctggactgcagtgattgttattgcccctctgggtctagccacccagttgggttatcaggctctgggctagtgctgagtaatggctgcaaagaatcctgtgatgtaatccatcttcaggtcttccagccatggatattagcaactgctccagtgaaggtgggaggggagtgaagtggattctgtgggagtccttggttgttgttttgtttagtgtggagttttacttgaattctggttattttagcagtgaggttgtcatgtggacagacttaggatctctggttagtcaaggtgttgcaggtggtagaattaactgttgttttctccttctttggagcaggattgttccattttgagtcgtcataatggcttgagttggttggcctgcaaccaggaggtagcattttcaagagagcaccagctgtagtagtcaaaggggaatataagcttgtcctaggttggctagaatcagtattcgggtttttcaagtgatgggcagggccatagagctcccaagagtttatgtcttttgtcatcggctaccaggtcaggtagagaaaaaccatcaggtgcaggccattaggtggttctgagctcagactctccttgggccaggattgctgtagccattctgggtgtggagagtggtactcagatcaatggagttatgttcccagggggattatggctgcttctgctgcatcatacaagtcaccagggaagtggggggaaactggcagtgacaggcctcacccagcatccatgcaaccaagaaggccagtcttactttccccatgccccatcagtagcatcgagtttatattcaggcagccagtgagcagggctgagattttgccccaggctacaagactcccggatgagaaagcaagctgggctttcaggcctcatccctccccacttctggcaccactggctgtggcatctaaacttgtatgtgcatttcccatttgcacccccttgattctgctcaggaaaattcatgctcagtccaaattattacaaaattcagctaaaaacttccatcatctgatggtaccttcccagttctgatggctgccttccccaaggacccctatgagttaaagcttccctgggctagagctggggaccaggagtgcctacagagttcatcccgctgcttctacttttatatttcacttggctccctaagtctgtttcagctctaggtaaggttaaatccttctcccatgatctgagctgtcttgtggagtttgcagtagcaaactgctttttttagagggttcgtgaattctttcagttttcacggtacttcatatggtggttcttgaagcaaaagttcacaatgtgaatctccacacgctgttctgtacgtccaagagtgagatgcacatttgtcctgtctcctatccatcattctattttttccaaaaccagaaaacaccatcaacttgatgtgtgtgacatatgtgaaaataagtcatgtgatattggctgattgggaatgggtccaatagactttatagattgatggaaatattctacatctttataggagtggtagttacagttacttaagtaaatatatttataaaatctatcaagttaaataagatttgtgcattttattgatttttatatctcattaaaaataaaatgacatgaaagcataaactcaacaacaaaaactgtatctggttaccttcgtacaatgtttttatcagtaaacagaggtagaataaaaatagcttacaatagcacaactgttttcagcagacctgtgtttgagacctagttttgccacatgctcccgatatggctttgagaaaagtaattaacttctccaattaattactcttagctttgccatctataaggtaagaataatgaaagttcctatctcacagagttgtaatacttaaataaaggggcaaagaacatttacctgtgcatggcatataaaaagaggacaataaaagtcccaacactatctttgcttccaaatttaagacaagaatattagatttagctgaaaactgtcatatctttaaatgtttaaatagttattagttaaaattaattgagatattctgagtactacagcaaaattttatttaaaaaattcaacaaaatatattagaatagaatcataatcacaaatataattgaaataacatagtacctagaagcattaatcttcttgaagtctatttcataataatgaaaagctgccaagacccatattttatttcacccttatcaaattctcaatattttcaatgtttttcacgtcgctcaaaatgatggagtttgagttctattttgttaaggcagagcacagggcatagtctctgtcaccaagcgaatctaatagtaaaaagaatcaatgtatcctcaacactttattatttcccataaaacattgcatttctcagagaatttagtttattcaaatatgaaaaaatactacgtaataaaatttaaagaattattttaaaaataaatgcattaaattctttcactttttttttttttttatttttgagacagagtctcactctgtcgcccgggccggagtccagtggtgcgatctcggcaactgcaacctctgcctccggggttcaagcaattctctgcctcagcctcctgagtagctgggattataggtgcctgccaccacacctgactaatttttgtatttttagtagagacggagtttcaccatgttggccaggctggtcttgaactcctgacctcatgatccacctgcctcagcctcccaaagtgctgggattacaggcgtgagccaccatgcaccgcttagtttatctcactacctgggtgatgtgatcattcatacaccaaacctcagtgacctataatttccccatgtaacaaatctgtatatgtatcccatgagcctaaaatcgagttagaaaagataaataaaatctaataaaaatcattttaaaagtatacttgacaagctacaaaagtatcttcatatttgttttatgatttccaggggaagaaagttagataatgaagaatgaaataatttgaaaaagttttttggtaaatgttaaaaaaataataattacatttcacagtttcagtatatggaaaaatttattttgactccatagcattttcatttaaatactttgaaaaacaaactcaaaatatgttttaaattgttgatgatttcaaatattacaggaatagaaactttaacttaacacagaatgattatctggcttccttctgtaaaatatcttaaaggttaatgtggatttgaattgcacaacattccaaatgcttctccccctttaaaaagaatagtcttatcttttaaaaagaatactcatatcttttatttttcttatgcaagagcaaaaataaggaaaaaatatattattcaggagaatcatggcaacaatttaaggaagacaaaaccagtctttagcaaccagtatacatatatatcatctttttttctgctttagggtaggttgcttctatcaccaacctgttccaaatcctcctcttacatgcaccattaaaacatactctttcaaaaacgaggtgataaaatcacaaatatcaatctatcgttcagaagaaggtacctttattttaccttaaaggaatttgatatataatggagaaaagaaaattactttctaatttccaagactcaaaaagtgtcttggggaatatctctgtccttgtttgtttattttaaggctgatggccttttcagaattcccaaaatgataataagtaaaagtatctactattatgactacatttagattacatgtcaatacacaatgaatcattgtcacatttatggataagttataggtccagttttgtggtcgtattaaagagaataaagttaaattaagtaaatttgaaagtttgttaatcttttttcatggtgacaaatgtcttagtccatttggactgctataataaaatagcataaactgtgtggcttatgaacaacaatttattttctcacagttctgggagctggaaagtctaagatcaaggtgcttacagattcagcatccagtgaaagctaattcctcataaatggaattttcttgcttcatcctcacatgatgaaaggggcaaacaagctctgttgggcctcttttctaggggcactaattccattcatcagggctccacccttatgatctagtcacttcccaaagttcccaccaattaatactatcatataagattagatttcaacctaggaattttgggtgacacaaacatttaaaaatgtagcaatcaatatgtttaattaagttgttctaacgatttctctcatataaacttcatatctgaagatacatactttgaatagtagtccttattatacagattaactaatggtcactgtgtcagttaaaacataagtagtgttgtaataaaaaaaagtatttaaaatccttggttacagaaataaatttatttcttgctcatgttcaggttaattatagattggctgtaggccttctctatgtcatctgcactccagaacgcagattgaccaggcagcctctctctgaatatctttgaaatgggaaaagaaaaatggagcatcacacatagctatcaaagttcatgcacataacatggaaatcctgagttcaacatagatttaaggatttaaagagtcaaggatttcagtaatccctctacagagtcagtcatgaaacaaagaaaatcacaatatttggaaacaaaattacatccactacagtactttagcaatcatgttgttttatttcactttgtttataaatgaggaaattagtcttaaaaaacaaaagcaacttgtccacataacagttatttaatcatagtgtctgtcccaacatgaaaataaaatcatagttttctttctttcaagattagtaaacataaacagaaatgttactagaaattctccaccgtgtttttgcaacagaaggaagaagggaaagctagacaaagcagatggcaaaacatgtgtcttatggtctcatctattattaaataaattattgaaagcaatatattcaccatgaatttatttatatattgaatggatagcctctacttctttccatgactaaaataattattttcatagaagaatagattctaagaagaaagaaataatattttgggggaaaccctatgtttgtattcaaagtgaatttataaatactttctgaaaatctttcaaccttttaatctatctaagctctataactgatccaagggcagatatatcttttgagtttctccatttttccaacttataatgaattaaaatagtgattcatactgttatttaactctttaatgtgtcactgtcatgcattcataaggaagtagatttcattacctataaataaaggaccatgattccattcagccgtgaacatcaaataggcaagtaatagatattccataaatgcctaacgatagactgtgcattagaaaaaaaatcattttatactatgaatagctgaaaatactggttagccctgtagagggaataataaaatttattaccctcaaaactgctcaatatttatgacctttcatatgaagcatttgtttaaaatttttagaaaaattgaatgaaaaaataaaaagatgagtttttttttccttttgtatggaggttaatgagttagtgaaagctcattacaataggcttggtaacatgaatttgaactcaatgctgcaaaaattaatagtataaacctggtgaagtctttaattctcttgttttaggttcctcattgatataataaaggaactaaactaaattacaattgactttttctttccatatttcaaaagtatagagtaagaatactagcatgttttactgttgctatgcaagcaataccaccgtaattgggttttgcaatgaaaagttaatgtaaaataagaaataatataccattatccaatataatgatgagcagtgtttttatgagtgcttatcttaattttgttctattttataatgtaatattatgagcagcctatataaacacatagtgaaatatccaatgataaggcatagtctctatatttttggcaaatatatatttaagtcaaaaagcatttacaggcaagaaatatgaaatccattaaaatccatttgataggaattttattatgtacatgtcacacaataagcactttctcccataccaccttatttacccagacctgttattcagcatactatagcaccacaaacaaacctgctgggctctctctcctatcttttgagaaaaatattttaaactttggcaacctcagctattcctgtcaatgtcaatctaataacatgtttgtgagcaagttaatactccattcataataaacaacccagtttgcacattcacttgatacctcattatcagatttcattttctgccagaacccagtatcacgctaagctgtttctccaaagaatatttatctataaaaaaagaacatgatttacttccatacctagggagtaaactccctatactgtgatttactgatggagctccctagagctcattagagccaactctttgatacaaatcttttgaatgttgtttgttcacctcttttttaaagtacaaagggcaaaacatctgcctccatcttctagatatacttcagagcttcatttgctctaggctgtactcaaacctggcagccttcctgactacccagtaaaagtgccagagtagcttactcaaacatggaatgtggcctccagaatccaaagaggccagtcaagtgcttccatattaatgacacacaatgcaaagtgcagtaattttccattacagagaaaatatcctaacaagctcttgctcacaggatgactggaaactttccaagagagaagatccctgaatgtcttttgtgtttctctctcaagctctatcttatatatatgttagcaaagcatctagttttttatttccttctctctccaggctcagtgtcaaccaagtagtgaaacagtgtgataatgggcaggattttaggaagattgggttttttcacagactagcctatgccagactacagaatcgacatagaactgcagtacaaaattgaagctacactgttgttaccaggtaaaagtgaactgcggccgggcacggtggctcacgcctgtaatcccagcacttttgggacgctgaggccggtggatcaggaggtcaggagatcgagaccatcctggctaacatggtgaaacaccgtctctactaaaaatacaaaaaattagccgggcatggtggtgggcggctgtcccagctattcgggaggctgaggcaggagaatggcttgatcccgggaggcggagcttgcagtgagccgagatcgcaccactgcactccagcctgggcgacagagcgagactccatctcaaaaaaaaaaaaaaaaagtgaactgcttataatggttcttccaaatcactatagacattactagtatttcctagatcaataaccacatgtctggtcatggggtattcttgactagcttctatggttaatctgcttccaaggttaatctgctttctttttaagtgatttagtttgagataggatagaaatcatcaaactttgacaacagtttaaaattcctggcacatatctcttgaaaataaatatcatattattttccattcattttaagtgcttgtttaacagagacgtgataaactcaatagagggttttggtgggcatgttatgttatcattatccaaatttaaggagaatcttcaacaataaattattcacaactgaggcatataaaaaaaacacgctattattgtgccaacgtgcataaatatatattaaatttgtaaacctaattatatttggatttttaacccctagtgctaaaaatcagttaccatttgaatctgaatctgtccttttatttctttttgaaagccttaaatagtactgaattccatttcctatttagtaaagacatgcattctattattgtaatgtttgttttgtttgttgcttttccttatagtaatgacatgccagcctccatgtaacttcttgaattcttaagttggaaacacttgtatttgaaataaaattcttaggtgtataaccaaattcctgatatttaaaggatgtgcaggcttagataaggtatttactatttttaaaaccctctgcattagtaaaagggtagtaataagaaaaaagtagagttactaacaaaggagttattcagactgacaatataacacataaagtccataggttatgtgtcgttaataccagatatggattctggctttcctaatcattttctatagaagcatttatagtcacaaagatgggactcagtgggaatgagccaattcaggtcaaaagggtattcgaatacatctataaccattgataattttttataacatgtatttcttaggtattttttgtaactataattgcaactatatataatagtattttatgcacaatagtgtagacataacaggattttgggttatttccccaaacttactagcaaaattaccattttcctacaagtcatatgtctttcattagtgggtaggtcactagaggccaatgaagaaaaaacacaggagtctatttataaagagacttaaccatatctagcaagctaataacaaactttattaatgcaggcttcctagtgtcatgttggatcacagccgatttctctcctgtgaatgtagcacaatggtgactcccaatttatctcatgctaatttaaccacgtgacatacatgtttattttaatttgtgtccctttaactgggagtcagttactgtaagatcaagtttgtcatagtttagaatggctataatgatttcataaatattgtactccagcacacctagccactgaccgtttaagtatatcagatccccctgcaatcaatatgccaatgagttctttctaactgaatggctatgatctccttgagagttgttggcaagcagaatgccctgtagccctgtttagtaatatacatacaccacttacatattgcttcataatcttttcagctgactcctgagtgttgtcagtattctagtggaacacccctatgagtgtcccaaactaggttaaaaagttcttctcattatcaggggtaagagttcagagaaaccaagtcataagacccaaaatgccttttgcacactgaagccatcaaattggaatctgtgcagcttataccatcacaaatgctgctgccactgagtgcttgaagtatgcatacaattcaagaatactgtaaaagtgtccaaaagagtgtgccttctggatattttagattcagcatattcaactcctatggtcgttcgctctgaatatgacaaaggcttctcataatcattctaagtatgaatcattaattatattaactgattatatcatattaattatcaccccgttggacattattctgcttacaaaaagttatgattacatattattctacccactttcaggtttggtgcttgactgctttgagtaacagcaaagtggcctctgaaatacaaatgtgtctacttttatcccaacaggctatcttcatacacagcatcagagtaattcagctactcattgtcaactgactgccacatacatggtctgatgcaaagatagaatttatttcaaggttaaaaaagaataaatagcattttgggaggctgaggcaggtggatcacgaggtcaggagatcaagaccatcctggctaacacggtgaacctccgtctgtactaaaaaaattagccaggtgtggtggcgggcacctgtagtcccagctactggggaggctgaggcaggagaatggcgtgaacttgggaggcggagcttgcagtaagctgagattgctccactgcactccatcctgggagacagagtgagactctgtctcaaaaaaaaaaaaaaaatagaataaatattacaaatgtaacacacaaaatatgacccaaactgcaattccaatctgctattttctaggtagattgctaggaaacaataattgatatattctcttgaaattacccaaatagagtcacgtgtaaatcttacagtttggttctttcaacacaaaccatgactctgaatcacaataatgagaaacagacaggggtttacttttcctacactggaaactttcttgggaaatgagtgagattgcattcttttttatcatgtttactcatttgatttactcattatttttacactcgacattaatgatgagacatttatgcacactgaaaagtgtttgttgcactaatgaacaacttgaatattgaatgatgtagaaaatttaatttccaattttatggttaatcaagaacatttttgctgtaaattctacataaatttggaggtatatgtctgtacatccatatactcaaaatataattttaagtagataaattgtttcttgaatttgaatatgttttatcttataaactatattagatctaaattattgtgtcaaagtcccaaagacatactttttgattaagcatgttatttagttctaaagtcatatgtgtgtgtgtgtgtgtgtgtgtgtgtgtgtgtatgtgtgtgttctcagtagaaataagcagagaaaccctttttgttagctcaacaaaagaccattacctattgctcctgtaaatggcaaacacaaaatcctcataaatgaattctattactatttcaaaatatagttttcaggacaactcattcagttagggaagattctctctttttctattgattagaatagtttcagaaggaatggtaccagctcctctttgtacctctggtagaattcagctgtgaatccgtctggtcctggactttttttggttggtaggctgttaattattgcctcaatttcagaaactgttattggtctattcagagattcagcttcttcctggtttagtcttgggagggtgtatgtgtccaggaatttatcaatttcttctagattttctactttatttgcgtagaggtgtttatagtattctctgatggtagtttgtatttctgctctgatcttagttatccttgccttctgctagcttttgaatttgtttgctatggcttctgtagttcttttaattgtgatattagggtgttggttttagatctttcctgctttctgttgcgggcatttagtgctataaatttccctctacacactgctttaaatgtgtcccagagatcctggtaagttgtgtctttgttctcatcggtttcaaagaacgtctttatttctgccttcatttcgttatttacccagtagtcattcaggagcgggttgttcagtttccttgtagttgtgtggctttgagtgtgtttcttaatcctgagttctaatttgattgcactgtggtctgagagacagtttgttgtgatttctgttcttttacatttgctgaggagtgttttactaccaattatgtggtcaattttagagtaagtgtgatgtggtgctgagaagaatgtatattctgttgatttggggtggagagttctataaacgtctgttaggtcctcttggtccagaactgagttcaagtcctggatatccttgttaaccttgtgtctcattgatctgtctaatattgacagtggggtctagaaataccatttgacccagtgatcccatcactgggtatattcaaaagattataaatcatgctactgtaaagacacatgcacacgtatgtttattgtggcactgttcacaatagcaaagacttggaaccaacccaagtgtccatcaatgatagactggattaagaaaatgtggcacatatataccatggaatattatacagccataagaaaggatgagttcatgttctttgcagggacatggatgaagttggaaaccatcattctaagcaaactatcacaaggacagaaaaacaaacaccgcacgttatcactcatagataggagttgaacaacgagaacacatggacacagggtggggaacatcacacaccggggcctgtcaggggctagggggctggaggaggggtagcattaggagaaatacctaatgtaaatgacgagttgatgggtgcagcaaaccaacatggcacatgtatacctatgtaacaaacctgcacgttgtgcacatgcaccctagaacttaaagtataataataataataataataataataataataataaaaacagctaattcagatttcatcctttagctaccttctcctaattaaatagtagttctttttaaattttattttttaattctatttttctctggtccttttaaaagtaaaataatatcatcaatttatagtatatttcaaaatagctagaagggaagatttggagtgttcccaacacaaagaaatagcaaacgtctgaggaagattttaattacagtgatttgattatgacattttgtatgcatgtatcagaaacacacatgtaccccataagtatgtagaactattatgtatcaataaaaataatacgtctcttaaatgttttaaaatgaaaattttaacacctattttaaaaataaaataataaagcaagtgtgtccaacctgtggccaggatatctttgaatgcagcccaacacaaatctgtaaattttttaaaaacaatatgaattttttttgcaattttgttttaggccatcagctatcattattactaggatgttttatgtgtggcccaaggcaattcttcttcttccaatgtggtgcaggaaacccaaaagatgggacacccctgctataaatactagattgtatttatatgtcttaggaggagttaatataaaatatgatttattataaaaggtaattatattaacattatgaacttttttgaaaatttgtttagctgctaaaaatttaaacaataccttgaaaatcaatgacaaacagaaaattgatccaacatttataagcacaagagtgcaaatcacttctaattatactagtttggtgtcccattgaatactcattttctctttatttagtccagatttgacatattcatgatataaaaataagatccagataaatcattattctgattttatccaccaatgagaggaaaagttagtatttattttattcataatcaagattttgttcataaataactcatgttaacattcattaggcacgcttgcatttttttcacattttttgctttgttttgttttgtttttttggagactgagtcttgctctgtcgcccaggctgaagtgcaatggcgcgatctcagcttactgcaatctccatcccagggttgaagcaattctcctatcttagcctcccaagtagctgggattacaggcacacaccaccatgcctggctaattgtttttatttatttattttttttttttgagacagagtctcactctgtttcccagcctggagtgcagtggcgtgatctcggctcactgcaagctctgcctcccgggttcacgccattctcctgcctcagcctcccgagtagctgggactacaggcgcctgccaccactcctggctaattttttgtattttttttttagtagagatggggtttcaccgtgttagccaggatggtctcaatctcctgaccttgtaatctgtccgcctcagcctcccaaagtgctgggattacaggtttgagccaccgcgcccagccatgtttttctttaatcatattggtaagtaagcacagtaataaagagaatgaatttaaatattaattaggggaaatggatatcttagagaaaaaattatgtggcctgaagacatgttaatgctacttaccattttatagttaatgctacataatattagggacaatttttccctaacgttagggatagtttgaaagatttgaagagttatgaataaattgcctaaaacaggatttaagtgttaataggtctaagtcaattgaagttaaaaaaaaaatcagtaacaactaaatttaaggtaaacttataggatattgtaccacggccaatatccatggtcacttagtcacttagaatatactttaaaaggacatattatttaatataaaatgccaagttaaagtgaaaaacaaagtaccctacacctacacagaataaaagataaacagttatttgattgtataaattaaaattgattctgatttccaattaacccacaacttgatgaattcacagcctgaggaaatatccagcatattaatttgttctcatttccttttattaatgaaacagtgttcatctataacacgaatctctggaactgattaaagtattgagtaactgaagacatgatatgggttttttgttggtttcagatggagaacaatgaacaaaatgatggagttgagcaatctccttttttttttagtatttaactggaacaaaataaaacattatctactaaggtcattatattgacttgaccaagtttaatttaacttacgaggaccataatcaaatgtatcattagaaaatattaaaataccatgtaagtatgaggagatatttaaaaagctcttcttaaaaatatatcagtaactaatcaaataaatattatagtatattattgatgtattaaaaattaactctcaaaatttaagtcaaatgtacattagatgtctgaacccatgaattactctcagaaaacataataatcatatatatgtcatattagaaatacttagagaaagaaaattctattcaaattgaagtcatctaagcctcttcattttaatgttttaaatttcttgaaacaaagtagaaaatttaagaaaacacacataaaggataaataaaagcctatcaattcatgcatatgttttgcattcaaaagacagaatttagatactaattaacataaaaatattgatttctaaaacctgatttatgactttttccaaaatatttttttctttgatatttccaagtattattattgttataacacatattattattataaccaagtattattggtttttttatatttacaataaatgaatggaaatttgtctccttttaactccataagagatgtagtttctaagaagtaatgataagtatatgatttatttaaatcaccattaaggaaatttcataaaatttttgggaaatatttcacttttgtttgtattttggaacagatttacagtaagagagagaatagatatctatactgggaccataataagctgaactaatagtgtaaattttttactgtaactttcatcccaaatttcttttatattcttctttctcttagccttgtgaaccctgaatatctgagacaggtctcagttaatttagaaagtttatcttgccaaggttgagggcatgcacaggtgacacagcctgagaaggtcctgatgacatgtagccaaggtggtcagatcatagtttggtgttatacattttagggagacatgagacatcaatcaacacatgtaagatgaacattagttgtgcctggaaaggcaagacaactcaaaacaaaggcacgaagacttgaggtggggagtgggctttcaggtaatgggtaggtaagagacaaatgattgcatcttttgagtttctgattagctcctccaaaagataccatcacatatgcgtttatctcagtggtcagaagggtgactttgaatagaatgggaggcaggttgaccctaaacagttcccagcttgactttttcactttagcttagtgatttttagggccccaggatttattttcctttcacagtgtgttttccttcttgttgacttaccatgttttcttttatattatgctatggagttggaattttcttgtattttggagtctacaaagctgttgttttctaagtaaactctttaatacatcatgttcagaaatgtgcttcttcagtgaatcacaaagttcttgacaatattttcatattttgcagatttttgataggtactctgctgtttgtctgctttctcggttattcttttatgaatggatgacatctctccatagctggtctttacacagagacttaatggccccagaatcatcacaaagtagttgaattttagctgaggtgtccagtgagttctgtttcctaaaatatttacttggagtaataccactttcttttattttcactgactaggactcttattattttcaagaatgagatttatcatattgaggcaggaaaatagaatctggaggcagagagcataaggccaattcacacttcagctatgacaggaaatatcctctctatagggcgtaggcccagtaaatgactttgtaactttacttcatcctctccatttacatagggcatacccgaagtaactaatggaatcctctagagggtatttaaactcccgaaagttctgtaacagtgcccttgagccctttgcttgggcccgctcccacactgtggagtgtatgctttcattttcaataaatcccttcattccttccttgttttgtttgtgtgttttgtccaatactttgttcaagatgccaagaacctggacaccctccaccagtgataatatgattcttctttcacaatatattacttacacaatgttggagcttgctttagcattatgagtacaatgactgatccagtgattttggatcagtcatttcccaagtgttattatgcaaaaaactacaaatagaatccgctaacattgaaaggattcttaaaactttcttcacaatacattgtatctcaaagtttaagccactgttcctcagtacaatgaaccccgaaactttgtgtaatgtatctttcttgctttagtatttttttctctttcaacatccctagttacagtcatttttgaaattaccactctatatccaacaaaatgccccattctcaatatctctgaatgctctctccccttacatatatttttttttatacacagtctccctctgtcacccaggctggagtgcaatgacacgatcttggatcactgcaacctctgcctcccgggttcaagtgattctcctgcctcggcctcccaagtagtggggactacaagtgcatgccaccatgcccagctaattttttttttttttttttgtatttttgtagagatggcgtttcaccgtattagccaggatagtcttgatctcctgacctcattatccacctgcctcggcctcccaaagtgctgggattacaggtgtgagccaccgcacccggcctcccttacatattctaactgaacctgcccttaccacaaaggcaccacttactctgaagccattgtaagtagagattggtttatttatcacaatctccaggaaatttaaaaaaattacctctagatatagattgatatatagataaagaaagtaggtctagatatttatgtatgtatatattctgttctcttctaccattttattactgattattttatcacagtccccaggaattaaaaaaatttatataatggagagtaatataaatatagttatatagatataagatatagataggtatgcatatattctagtgtcttataccattttatcactgaaaaatatgaaaaactacatcttgattatctttcttccttaaatacaaaaactactcttcttgatggctaatgcctgtttctggacaccattcgtacctcacaagtacattcaacctgtcttgaaactatatcttcccacttatttttaaagacacaaaaatctcaattcaaattacgtggacctctccagatatatctatttcttcttcttaacactacatttatcaaaaattttatttaactattatctttgttcctcactccgcactaactcctgtattgctccaccaaaactactctaattttgtcttcacataggtcattttacagagattttcagctcccatattacttgacttctcagcagattttgtcctagtgaaatcctgtgttcttttggtaacattctattcctttgttgtgacccagttttctctttgttttcctattatgacccttgctggctgatgctatactatctggataagaaaagttgaaaatcctcaatatttattacaagctatctgctttgctaaaattatatccttttcctggacaatcatacacgacacacacacacgcacacacacacacacacacacagaactatttttttcaattctgcaagtagcttacaaatttatttcttaatcacctttctgttcacaagagtctcatatccaacctcatatgtttggtatttttcttgaatgtcttagagttgtctcaagcaaacccaacatgcttactatactttgcatgtttgtcccctccaaacctcatgttgaattttgattcgcagtgttggaggtggggcctaatgggtggtgttccttcacaattctccataaattaacaggttcctcaaactgaaagccagtcttctggaaatggctggacaactagagatgaaataatgtccaattccttgatttaccatattgtagtacaagtaaattcctattttgaagcagtttctccatgatgatattgcttgccatttcagcacatgcatttctactattttctcaatagcaactatcctaaacttctgtgggttttcctaatacactcacagaatgtagaatttctggattgtggtagcatgtgctaaaagttaagtataattctagttctgattcagaatatatcatgtagtaaacttatgagaaaatatgaaaaacttgaaccaaaacacattaaacatggtcataaaaagacatagtcaattatggttttgcaaaagcccttgtaaagctgaaaagattgttggtataaaaagctaatctgtttctattactgactaaggtgtatgataattatatttatgttatcaagggtgagcaggcaatggatataaaagagataagaacagatgaaccaatctcagtgttatctatctgccttctacagaaatgcattaagggaaagagcaatgttgttattctactgtgaaaaggaaattatgaaattttaaatttgtgccaatagaagcaaagagaagtggaaagatgggtgaaactgatcactgtaagcatctggtttcagtaattcagtctgctcaaaataaatgtttatgataggaagtcggcagcacttgtaagttgataatttataaatgtgaaaactaactcccctccaaaatacttgatcacaatgtattttttcaaactagtatgctgtggaagaaatgcctttagcttctagatgaatgtttactaaaaacaggccccatgttgttaattctatttttataatgttgatattcacatcaggcttaactaggcataaaataaaaacaaaataaggcactataattttttattcaatttaagaattataagtaattttatttacacatgagaaatgcaaagctaattttatatgacattttacatttacataaagttaaatacttaaaggtatgtattttgataaccattgatttattttttaaatggtctaattaaaatcatatttgaattctcaattattttcactactaaataaagcatcatgactgaatataatcttaaaaaggatattcattcctacaaatatggggagaatacagttattaaagttttaaattatacatttaatatttcaaaatttaatgagtgacattatacgttgtaaaagtacagtatcatagtatcttgatatgttaaaatcttggatgtcatcaacaaacttataaatagtttccttaaaaatttaactaacatgctatagaattaattttcatggtctcaaattgtactgactgatattgtaaccaatagtagcagtcctagactagtgtcagttaccatatggtacagcacaaacagagaacgttttttatcatctcaaagttctacaggacagtactgttataaaactattcaatttataaaaacaatttcatgacttacccttattctttttctttatttttttattattaaatatgtgaccactgtggaaatttaaagttagctcataatttgctttaaaaacataaaatccataactattttgaagcaaagtctcacagcaatgtcatttgttttctttaactgtttttctaagtcagttcggaaaacaaagaaggtaaaattaaatcactattgattaaacatctagcaatgagactcttatttcaccttgtctcttaaatacattaaaattcagaccaaataatctttacaaagaaaaaataacttaaagccaaacaagcggaagacttaagtgatgcagagtgtatttcttattcatttgtacagaaaactatatttctatataacttttgcagaattctatacaaggcaattgttttctgaaatgaagtagatttctatgacatacacagacttcattttcggactacttcttttaatgtcaaaacgaatgcaattatctgatatcaccatatttataatgcttattattttatttggttaattaataattaaatcatatataacaattatatgctacttcttaaattaagaactgtaaaggcccatatttacccaggtttcgctgatctctgttaaaagaaaaattttagacaaattaaatttaacagagtttatgattgatagcaaagaatgattcatgaattaggtagcactcagaagagattcagagagttctacccagcagtgtgggcagcaagctttataggctttatacttttggaaggaaagtagagaaatcacctgattggctacatctaggcctttgccctttttaaacatagcatgatgagccatttgttttacttgggcatggggcctgattagttggctgctcatgattgtctgaagtttatctttgattggctgaaattcagctgttcgttatgaaaatatactcccaagttaggcttcagtttgtttacttactataataagttaggttgtggcttgttgcttagaaactcaaagtccagagacagtctcaggctaatggcctcctgcccacttatttggcatcccctttggcaactattgttttgaaataatagtgaaatatccagttcacaagcaaacattgtccttttttaactgtaaattgatgacattggaaatgctctaacattgcttcagaggctataattctctttaagaaccttgagtgtagagtttttatttaacctattaacaagcatgttatttttaacaggcaagacacctatgtactatcgaacatagtacatgcacagtaagtatatgttcaactaaattaacaaacagtccactaaatttgtcacaggtctggcctataatggttgatcaataaatatttgttcaatgaattaaaatataactaaggagcctaaaagagtgatgaaataaccactaatatgcatataccaatataaacatatgtattattttatcagttgagtctacttatgctaattaaaattgaaaatttccccagaattctgttttttaactactgaaactataaaagcctgaacacgaaaaacaattgtgttgtcaaatatacatctttgaggtctttccacttctttctattgtaatatcctaaatggtagcctggaagaccgagagtccacgtgagcgtcaaatagctttatcacaaagaacattggataagtatttagatttcacatttaagcttatgttttctactacatatcaaactacataaaaataaatcaatagaaatgtattggttttatgaccttaacgaaattcacttaaactctccaaatgtcaatttacacagctgaaaatgtaatcaataatatctgtatttctgagtccagtactttttataagtattaaatcactgttataaacatttttcaaaagcaaggactcatatttaaagataaaagatcatattttataaagacaaaaacatcatatttaaagtactcaggaggaacatctaatagcattattagtcatttatgaagaattctatttataaattatttagataaaaagtgattatacttttttaaccatatatgtatcttagcactcgatgctcttccaaatacttattggttatttagaaataccaactgaagttatgattcatagctgaattatgatacaatattttctgaggatataatatatttaaaaattaaaggcaattgctgggttgataagtatttatgtcttggagcctcaagaacactggctctcaaaacatattttagagactttaatttgacatataagatccctcagataatcgacaatataatctaatcttatactaatgccacttaataaatgttatcagtttactggtttctgaattagttgctatgaaaagagtaacaaacatccttaggtgactgcattaagccatcagtaacttcacaagccattattgaatgactcattgaatgagtcctatgtccagtaagtgtggggaattggaaaatttgactccaaaataatgattgtgccagctaacatttaaagcatatagttttctggagataattttagaattaaaacagaagtttaaaacaatcacacattttttcaagtgtcacaattagtctccataaattgaatagggaaaaacatccaaacagttcctattggtctgaaatagtttatgccacttaagaaggtttgaaattcttaaggtttatgataaaactcttcgttttcattggtaatatgattaataatgaatgttttattaatagttcatcttataattgtaagtgctgagttaagggaaatttgatagcttttcctgcacttgatcttacagtcaagagccacattttaaaatccattgctctaattatagtcaaccactgaaatagtgttttgtcagttttcctctgggacatggattgatgtttttatcctctgtaaaagccagcatgatcactcaacaaggattataccttattttctgtaaatagagtatgatattaatattggaagctcttgaaaattatttaaaacttgtcaagttttctgccctcattgagtgatgattgatgaggcaatatttgcaatctgtagtaagttttatgagtgaaagttgttgaataagtaatagagtacaagctactttaattaaataataatttattagaaatttccccatttcttctccttccaaagatacttggaaaaccaattaatgaaatatttatgacatttaagaaaccaaaattaagattttttttttgtttcatcatagaacacttaatagctcattgtttcttgtagttgaaatatttctcaccaggcaaatatcttacatttctaatggtgccaaaaacgggagcagcaatgatatcaataacgaaagcaaaattattttgaatggttaaagacattttttactaccagttctgcaaaaactaataactgataatcatgctgttgtttcacataattttatcctatagtgtctgtttttcattgtactatgcaatgactgtttttgtggaatgtacagaatgagaaggtgatttttatttaacgttcattatactttaatttcattaggtattttagttaaatgaggccaaattgcacgggttcagcttaactgatttttgtatagacaaataaactgtctttattgtttttaacagacatgctagaatttgacttagatcattaaatcatatctacttatttacaaagatgttttgagaatggatttttaaaattaattaagtttaaatatcagaccaacatgtcaaaacaaatactatataattccatactctaaaatacttattgtacttttatttttataactaatactaagatatgcccagtgttctcatgagcattacacttactatagaaagcaaacatctcatcaaatttaaattcttagaaatgtggaacatatcttcaaaaatctaagtcataactaaaataattttgttaatttagattattttattaaatatattttcattccattcatctggctgacattttgaaatgaaatgcaaacaattctccaattaataatttaatttttaaagatgagtttaatattaaaaattattacattgttattattatttttagcaaagtctctcttttcacccaggagggaatgtagtggaacaatcatggctcattacagccttgactcctagactcaagcaatccatctggcatattttctgttttttttttttttttttttgtaaagacaagatcttcctatatgttgcccaggttggtcttgaactcttgggctcaagtgattttcctgcctcagccctacaaagtgctgggattacaggcatgaaccaccacacctgtccaaaaaaacttactacaattttgataggaatttttcttccttccttcctttcttctttccttcgttcctccctttcttccttcctttttttttttttttttttttttgaaggactctcctctgttgcccaggttggagtgcagtggcacgatttcaactcactgcaacctctgcctcccaggttcaagtgactctcttgtctcagcctcccaagtagctgggattagaggtgggtgccaccactcccagctaatttttgtatttttagtagatacaggattttgctatgttggccaggctggttcttgaactcctagcctcaagtgatcctcctgccttggcctcccaaagtgttgggattacagaagtgagccaccacatccagctttgataggaatttctttgtaacatacttagtaatttgaaatgaattcaaaatagttcacataatctcatgcacatattatacattcaaatgattttgaaaatgatcggcataaatatttgcaaatctagctttatctaaaaattgttaacaagataggagaatatttttatatttatgcaaattttaaatgcctttttaagatcagaatttccaaacagatatgtttagtctatgaggaaattgttttgatctacagtcatataaatgaagaaccagtaatctgattctaaacttagaagtaaagaggaattcctagtaacttagaaaatgtgcccaacaagtacaaaactgttaattcaaaaattaagataaactcaattctgagataaattataaaaattattaaataattattttatgtgaagaggcaataacaatagaaaaaatatccccaatgcctgtatctcatttatttattattattattttacttaaaataaattgtaaaaggtacatagtagtagtttcctagcctcctaagcctttcccatagaaagtattcatttcagggccgcagggcaattcagtgatgctttccaacactcagtgttgttgtcgacactgtcattattatcaaaattgactccttttaaaatagttcaaaaataaatcctgtatatttatctctgaagtctgcatttgtgtgttattttcttgctatttgtttccctgtctaagaatgctagaataaagctaccatgagaaaagagggtatattttccccaaatactcataaaattgtggatatttaatctaatgagagactgaacagaaatattccgcattgtaggaacacctgccacctgaggatcagggtgcctcataaaaacagctgtactgagtaacctctatcccctctaccacactgatgcactgatctgcggcacctaggtgctaccaattaggcaggccactggaagattctattctgggaaacatgacctcttacggaagagagataaactatacaaatggttgtgactgatgtacatttttttttcttaatttaagaaattatcattttttctcagtctttgctctactttgccatatatctgagcaagaaggtacttaaccgtcattcaaagtctcccttgttttcatttattattattattattattattattattattactattattgagatggagtctcgctctgtcgcccaggctggagtgcagtggcgcaatctcggctcactgcaagctccgcctcccgggttcacgccattctcctgcctcagcctcccaagtagctgggactacaggcgcccaccaccatgcccacctaatatttgtagttttttagtagagacagggtttcaccatgttggccaggctggtctcgaactcccgacctcaggtgatcctcccacagacatgagccatagtgcccagccctcccttgtctttagtgtgttgaatctgattttcatcattagccgtgtgttccctaaagatttgcaatgtggaggagaaacaaggcatttgcttcttcctccaggagtggtaaccgaatgttggggtttaggtgggaatttttgcagtaacctctgaatgcctctgacattcattcacactgaggcttcagaggaactgctaagtcagtatcctgactctagctggtagctgctgtttttttgactgaatatctgttagatcaagaaatctaagttagtgtggtgcttattctaacttctcttctaagccttccaataactgtgatattattaactcactttgttattgaaaaacctatttatttttcatgaaactcttggacaataaatgcattatatcattaattaaattattgaaaaatgttagacacttggggaaatttctcagagagcagagagaaataggaaaaaaaattttaaagtagataacaatataaatgatagcagttcttgttactcaacagagaggacttgaacaactaactaattcaaggttctttctgttaacagacaaagtatctaactttaaaagacacacccaatgataaacccaaagagtaagaaaaaaccacatgatgggtgcattatgctgaaatgtgagagttctgaggtcaaaaagaagttcctacaagattgcagaagaatttttaaaagtacacacaaaagatcaagcatcagaactatattagttttcaacaaccacaattggaaaccactattggaaaactaagaagatattaataattccaatattaaaatatcaaagaagatattaaaaattccaaggtaaaattatttccaactcagaataaaatttctagccaaacaaattgcaaaataaagtttgccagatatgcaaagtatcaaaaattttcttcccattcccattgtctcaagaagctactaaaggaggtacctcataaaaatagtttttagtatttggagatccgtattggaacacgtaagataactctgagattgctatcttttagaaggttaaaaatgataagcttgcatattttaaaagcaaatttacatgtatagtggattaattgctaaattatgataaatacccagatacagagtaaatgacaacaatgtaatcattgggattacattgggattactccatgggaaacaagcaaaaacaaatgtatataataaaaaaatcatagtagactccttgcctcagccgtataaagggaaaacaacatatataatatgtgtagggcaatcttatatttgttaacaaatcaataaattatcaagaaatgtaagcatattttgtaaatatatgcagaaaaatatcaaaaaccacagaaaaaattctttcaagtggctgcccctaggacagaatgcacaggaaaatgtatgacattcttttaaatttcagtgatacttgaaaaactacttgacattttaacttagtcatatatgatttgataaaagcaaaagttgccttttaatagaccaattaggctgcattggcttcgtgattttcaaataaacagtacactaaatttcaagctgtatgtattcctgtggtgttttaatgtttcaagtgagtatgcattttgtatagcagaaaacaatcatattttaaggtgaagaggacaaaagtgtgctatattttttaacttttttttttaatttgagaatatccacctatgggcactttactttcaaacacatatttacagagttgttttccttagaaccctgtccatgaccttccattgtcttttagttttgaaaattgcctgagagtattttaagtctagactcattttgatgcttttcctgaaaataagctatataccagctggattataattaagacatacagaaattcctgcagaatgactctagacttagtttggaaatgattctagtttgcattctattttgcacaaataatttggaagaaaaaaatctctctctatatatatatatatatttgtgattgttctatagttttgtttttgttgtgttttttcttgtttataaaaattttaggtatagatatcaaagcaatgttttttacatagaattttcatctttactatgctttactagtctaaattatacaagatttattcaatttggccaccggagacttttaggaatgcaatttgttaatgcaaacttttgtttctccaatggtaattaactttttcagggaatcctttttcttcttcattagctaatatctataatataatgacaatgattatataatattaataatttaataattattttttattttgaaaatttttcatttacttgacaaatattttaatatacttatttgtcttaaataccaatttaattaacaacacgattttgggaaaattcctcttttcttctataaaatattcttaatttcaagtgccttctatttgaagtcattttatgtttttatgttttatctgtttgttggtttattttgctttagaatttccttctcttaacctggtgtgtgaatatcagaatgtatagagttaaatttctttgaatgaccttagttatagaaatatgccagaatagttttaattataagtgtctagaagataattttggctgacatggtgctcaaaagctatattgaaagctacccctctcagcaagataaggaagagaaggttagatggccttagcatgtccatggtcacagaaatactatttaaatgaaaggaagaaagagacaactatgcaacagaaatcttgatatgattagagcttctttattaaaatccataactttttcgtctcctaggaatacaaataatatgtcatgcagcttatgcctttcataaaacttttaatacaagttaacagaaatgctgttgatttacttagcaggataacattttctataagaatcaaaactactgatttagctataaaagaattcacaacatttgcattaattaatccagcttcatatataatataatgtgtgaattttctagctgctcacaattcattttggctctttattttcatgaatgatgattatgattatgatcatgatcattgtgtctgaagatactcaaatataatatcacgtttttttttctttcaaaattaataccctgggaaaaaagaacctaacatcaaatgcttatattatttccttgatgttgttatttttacagtcattaatccctaccatggatgtcagtaaataaatttaagtttggaatatattgaagattacctaggaacacgatcagaatgtgtgtgaatgtgtgtgtgattctgaattctgatacacaacagaggaatgactggcagatttcacacccaagcctttagtgtcagtaaactagataagaatattgtaaatatgaatgaacaaccattagaaaggaagagagataaaaaggggaggaaaatgttcagcttcatgaaaagagaatgaaagtaatcagtgtcactaaaattcaaaacactagtgaacattggtttaaaaattagcaacagatatcagtgacagtatgaacaaaaataattaacaattaaattgaaaattacagctgcatatcattgtttctcaaatatataccagctaatagagaaataaggattctcacaatttattttaatttaatcttcttcacacatttcagacatattacaaattcaaaaatggttaaacaagtttaacacctccagagtagtcattaaaaaatcgaatataatttatatgaaatagtgtgaagtgccaagtaagtagtaaacgatttaatcttatgacaaaatactacatattaatggaccaagtcatcaaagtgtctacaagtattaaaaataagacatctatgccagggacagtggctcacgcctgtagtcccagcactttgggaggcagaggtgggcagatcacgaggtcaggagatcgagaccatcttggccaactggtgaaaccctatctctactaaaatacaaaaaaaaaattagcccggcgtggtggagtgtgcctgtagtcccagctactctggaggctgaggcaggacgacaatcgcttgaacccgggaggtggaggttgcagtaagctgagatcatgccactgcactcaagcctggcaacagagcaagactccatctccaataaataaataaataaataaataaataaataaatacaaagacacctatgaaatatccttgaatttaaagcacatgatcttaagatgacctttaaaccactaattcaacagtgaaatgactttttatggaatacagtttgagggtcatagatcaaattgaattatattacagggttccctctatgacacacaatacatgtaataaataacttggaaactagttctgatacatagtttataatcttacttttaaagaaaagcaactttgtgaacaacagggaagacaatttcttgattttggcactagcaaagaaataggtttatggatttcaaatacaaataataaatggaatcacttggagaatgggaagattaataacataaaagtccaccaagtttacatagaaatcttcaaatactgtggctgatttcttgtgtttatcttaccaaactgtaaaaatgctttcagagtattgcagaatactctacagttgagataataagctactcttatgttatttatgcaatattattctttaataaacaaaatgtattgtattttaattgtataactatttgaaaatattttaactgtatttcctaggagtatagatttttagaggaaagcacattcaaatggatttaataaaatctaaaatatttagttgatgaactgacatttttattaattaaagggtaatttaatagtcatctactccaatttttttctaaaggaggctctctcaaaacttgtatctaaaatatggagaaaaacatttgttttactcacaacctgacaaggtacttaatttttatttacaagtgctctattttaagtccttcatttgatttttaatcataaaaataattaatgtattcactcaagagaaacttggggtgcagagtctgtgaaactttgcgtatttcaggaaaagatacatagatgggttaagcaactgctgcaatttgaatgtctccttcaaaattcatgctgaaacctaatccccattgtgtgactattgagaggtgggaatctaaaagtgattggatcataagagctctgagctcatgaataaattaatccattaatagattaatggattaatgggttaatggattaattggttaccatgagagtggaaatgggggctttataagaagaggaagagatatccgagctagcatattaccatgctcagcccctttcccctttaccacgtgatgccttgctgtttcaggactgtagtctcaccaccagcaagaaggcccctcaccagatgatacttctgttaccttgtacttctcagcctccaaaactgtaagacatacatttattttctttagatattacctagtttaaggtattctgttataagcaacagaattttgactaatacagcaacccactacatttaaaggggatgggaagaccaaattaaattttcatttcagtacattgtatagatggtagagttataaaagtgtaatgtgcaaatatcttaatattttaagataaattaaaaattataattatgtaggctgaaattattaaatgatttctatatacataagttctatgttaagtactttgtgtcagagttctgggcctgaaactttacacactgttatacatattgtcagttagacagggacctactcaaaaggcattttttaatcacttgcaagaatcagtagaaaacaaatgcaggtgaatttggaacaatgcaggggttaggggtattggccccctgcacagttaaagccagtatatgttttgactctctaaacaacattactaatagcttactgttgaccaataacataaacaacgcgtatttttgtattctatttattctatgctgtatccttgatgtaagccagagaaaagaaaatattattaagaaaatcataaggaagggaaaatatgtttgctcttaagtgaaagtggatcaccataaaggtctctatctctgtaatcttcacaagttgcaggctaaataggaggagaagtggctagtcttgctgtctgtttcagaggtggcagaggtgggagaaaatctgtgtataagtggactcatagagttcaaacccatgttttcaagagtcaactttattttaaaatgaaggaattttaaaagaaaactaaatatcagaaagagtattgtatcgttatttccagatcaagcattttaggtaaattgattcaatcattctaatattacctagatgaaatctgtcagcacaatgttgacgaaaattaaatggcatttccgacctcataatttattgttagggacataatatatctctaaaatgtaatgacataatatacttttgacattataactttaaaaaatataatgtttaggccgggcacggcggctcatgcctgtaatcccagcactttgggtggtccaggcaggtggatcacgaggtcaggagatggaaactatcctgactaacacagtgaaaccccatctctaaaaaattagctgggcgtggtggcgggcacctgtagtcccagctactcgggaggctgaggcaggagaatggcgtgaacctaggaggcggagcttgcagtgagccgagatcgcaccactgcactccagcctgggcaacagaatgagactccgtctcaaaaaaatatatatatatatgtatatatatataaacatatatatataatgttttataattctaaaaggaagagtttctagaataaaaggaacacatgatgctggaaaaggacgggtttcagaaaaaatctcctctgataaaatattactgagcagaaattggaaagatggctcaaataaagcaagataaaaatggcaacaaacaaacaaacaataacaacaacaaaaatttaaggcagagggaccagcatatgcaaaaatcccatgaagacacaaagtgggcacatgtgagagcctcatatgttcttttcaatgagcttgaatagcgaaattggagacagttctcggtacttaacagaccacaatgatgtattgtatctcttgctgaagagaatttactatcagagaatgctttaatcaaagcatggagattgtgatggttgttgatgaacacttatttgaatgataaatttaaatatttaataacactctcgtaccatgtagtttatattatcaaagatatactgaattagaggtgactccgctttgttttttacaaaatcccagatggaagaacggtcatttatgaatgaaagaagtcagatgaaatataacttatatttgtaaaaatatactcacacaggcaatggataagtcatgcatatttgttttctcaaaagacgcctgcattgagtggtagtgaacaaaagggttgattctgaatttgaagtggttaaccacaaaactctcctctaatattttaaattaaaattattataacctgttagtatttttatctattaataattcaaaataataaccttatactacattttattctctcttttactgcaatgccagttgagttattgatgtggtggttgtttgattttccatcagactggaggctattttgtaaagaaaatcatgttgcagtcagatagccaaggataaactctcaactcagtcagtttccaattccatcactttggtaaattggttatattctaaagtattactgctcaaggtgtggttcctgacctagaagtatcaatattactgggaaattgttgaaaatgttaactcttggatctttaactttggggttgaagtcccaaactctgttacatcaagtgacttccacacatagtatttgagaatcactgctctgaattttagtatcttcaaatgtgaaggtgatttaataatacttcctatttcaaacatggcatattggaggcagtgttagcatgcctctcccactaggaaagacaaaagatatgtagatattcacactgtgaacttttttccaatgagcaatgcaggaacttaacaggaaaactgaaatccacaggttttttgaaagaagtggcaggccatagcctacaccatgagccaggcgaaaaactgttaagtcctcagagtgtgagagggagagagactgtctctaggatatgttcccccattggggaacctggcagtctagcttatgaggaaaggccttaacctacctagcactggaactgatttaggtggcagtgaggaagataaaagtaggaatagcagtgggaggagacttgtgttaatttccagtctccagcacagacgaagggaaatcgttccttattctgcctcacaggggacctcatgaagtctgccaacccaaatgaattttgcgatataacctcaagtggggaagaactcccttagccagagccggggcaggcagggttgtagggtgcaggcaagtgggaagtgtgttacagccataagtgcaggagctgggcacccaggctgtgtgggagaactggaagggatgtggccagaaggctgtagttcttgtattcataggaaggtagatggtccggagcagttttgagttctgagcttagatgacctggaatgtagctcactcctgctaccagaaaactatgggtgtgagatctgtccttcccagcgcataggagctgggtggggtttgctgcagcatgttactccccactctctgtatgaactattctttgcagcagaggcagttacactcctctctgtaacattaccccagttggcagaaaactaccctcccacccaacagcagcaggggccttggtttgctccacatgcagagattcagagaatagacctgcttgacccatcccccagctggctttgctcctatactggccatggtagcttaaggcaagcacaaattccaaagctactctgacagctgatgcacttttccaagcaccacctcctgactggaagccaaccgacacagtccattatagcatcaacagatagaataacactgtacccaggaaggggaaaacttgtgcatgacctcagctatcaccattgcctgcagcaacctggctaaccaggaggttctgagtctgtccaggtgacctgttcattacttgcaggtgttctccatcaacagcccggaatgtggcagccacactgtgtaggtaatcccagaggaacacagcatatacagtagcctggctttcagggactcctacttctagaagaacaaggagcgtaccacattaaggggacacctcatgggacaaaagaactcaaacagcaggcttgaggtccagatctctctgctgacagggtttctttcagcaaagaagccattgtaatgctgggctcagcaccgaaaatctatggttcgactccaacagacaggcagctctggtgtttgcaaagagtcttggagaaggggacttctttccccccttgtttatcactgcagacacatctggggctcttcttatggaagctcagtgtattagtctgtttgcacatggctgtaaaaaactatctgagattgggtagtttataaagaaaagaggtttaatttactcacagttccatatacaggggagacctcaggaaacttacagttatggtggaaggtgaaggagaagcaaggcatgtcttacagggtggcaagagacagcgagagtgaggggagaatgggaaaacacttttaaaccatcagatctcatgaaaactcattcactatcataagaacagcatgagagaaaccacccccatgctccaatcacctctcaccaggtacctccctcaatacatgggaattataattctagatgagatttgggtgaagatacagagtcaaaccatatcattccaccccggcccatcaaaaatctcatgtcattctcacatttcaaaacacaatcatgccttcccaagagtcccctgaagtcttaatgcactccagcattaactcaaaagcccaagtccaaaatctcatctgcaacaaggcaagagtctatcatctatgaacacgtaaaatcaaaagcaagttagttacttccaagataacaacgtgggtacaggcattaggtaaatgctcccattccaaatgggaaaaattggccaaaacaaaggggctacaggccttatgcaagtctgaaactcagtgggagagtcactaaatcttaaagctccaaaataatttccttcgactccatgtctcacatccagggcacactgatgcaagacgtgggctcccaaggccttgggcagccctgcccttgtggctctgtagtgtacagcccctgcagctgctttcatagcctggtgttaagtgtttgctgcttttccaggtgcacagtgcaagctattgatgaatctatcattctggagtctggaagaaggtgactttcttctcatggttctactaggcagtaccccagtggggactctgtgtgggggtgccaaccccacatttcccctccgcattgtcctagtagaggttctctaccagggctccactcctgcagcagacttctgcctggacatccaggtgtttccatacatcttctcaaacttaggtggaggttcccaaactacaattcttgccttctgcacacccacaggctccacatcacatggaagctgccaaggccttgcaccctctgaagcagcggctcaagctgtactttggtttcttttagccagtctctgctctggctcccttttaaacataaattccatttcagaccatttctttgtgaatgcatatgactatacactttcaggagaagccaggtcacaccttgaatgctttgctgcttaaaattcttttttttttgacagatactctaattatctctttcaaattcatagttccacagatctctggggcaggaacttcatagttccgcagatctctgtgccccagcccatgaaacaatttttcccacctaggcctctgggcctgtgatgggaggggatggcaagaagatctctgaaatgccctggagacatttaccccattgtcttggctcttaacatttggctattctttatttatgcaaatatctacagccagagactttaatttcttcccagaaagtgggtttttcttttctaccacatggtcgggatgcaaattttccaaacttttgtactctgcctcccttgtaaacataagttccatttcagacaatctctttgtgaatacatatgactatgtgctttcagaagaagccaggtcacatcttgcatgctttgctgcttagaaatttttttgacagttacgctaattttctctttcaagttcatagttccacagatctctggggcagggacaaaatgccactagtctctttgctaaggcatagcaagagtcacctttgctttagttcccaataagttcttcatctccatctgagaccacttcagcatggactgaatgctaatatcactatcagcattttggtcacagccattaaacaagtctctaaagagctccaaacttccctacatcttcttgcctttttctgagccctccaaactgttccaatctctgcttccaaagccacttccacatttcaggcatcttatagcagtgccccaaacttctggtaccaattttctgcttctctttgaaggtcactgcagccatcagcttcacagaatttacttttcttcacatcgctgttttttttttttttttttaacactgcagcccctccctgcctggcctgtgcttcccaccaacgatgacctttctgcaacttcagtgccagtggaatcccagatctgcggctgcttctgagcactgctgactgcttctaggtcccaaaaccaccaatcagaagagccaaaccatgtcactcatcaaaggtagacccatagacagcccttctggaactgcagggtgactgcattcccacagaaggagcaccctccaggtccaggcctgcatgggaaatagagtcacaattcctctctatttagacattcctgaagatgaaaagaggtgcttgtctaatctgaatagctggaacactcgttcaagagtgtgtttgggaagtgagtaactttcctgggagctgagttggctccaatccttctatctgagaagatctcagtgtgtttcactgagagctcccccagccacctatgtcaaggctgggacctctgcccaccattgggtactgcattatgcacctgctttagccacagcaggtttttaccaggggcacctcctctttgggcctgaagcctgaggtattcaaccaagtaaataaaatactaggagaaaataaagaaagaaagaaatacacagactacagaggaataagataagcttcaagagacttctgccattccaaccctagaggagaaagtgaacttgttcacacactgagcacactgctgctacaaccagagccaagaaagccatcagacaaagactctctataactgaggaaatcatacaaactcttcactcctgaaagcaccaagacctgaattagtctagaagaaacaataaacatccttcaggaagaaaaaagaaattgaagaaacagtcaaataaaaaataaattcaagtataattagaagaaataatctaaccaaataagagaaatcagaaagatatttctggtgctatgacaaaataaggtgctataactgcccaaaatatcacactagcccccccccccccagcaatggatccaaacccagacaaaccttttgaaacaccaaattttaaaaattcaaaaatttgattattaagctattccagaaggtgtcagagaaaggtgaaaaccaacataaagaaattttaaaaaattttaggatacaaataaaaacttttctaaagagatagatatcttaaagaaatgcaaatcagaatttctggaaatgaaaggtacacttagagaattacaaaatggaggggaaagtttcaacaatggactacaaagggaagaagaaaaaatttcatagctcactgatatggtttggctgtgtccacatccaaatctcatcttgaattgtagtttctgtaatccccacaagtatggcaaggaccagtgggaaaaaactaaatcatgggggctgttacccttatgctgttctcgtgatactgagtgagttttcacaagacgtgatggttttataaggggctatttctcctttgcttggcatttctccttcctgctgccctgtgaagaagttgcctttcttccccttcaccttccaccatgattgttaatttcttgaggccttcccagccatgcaaaactgtaagccaattagatctctttcctttataaattacccagtcttgggaagttcacagaagcataagaacagactaatacactcagagacaagggttttgaattaacccaatcagaaaaaaagaaagaaagatgaatacaaagaaatgagcaaattcaaaataccgatgaaacaaaaagttggttgagagaataaaaaaattatacgttattagctagattaaccaagaagagaagagagaagattcaaataagctcaattagaaatgaaactggaagcacatggtttctaaagtcacctgcttgaccctcttccaagttgtactttccttcttttctctcttttccttattattctaaagctttttaataaacttgcactctggctctgaaaaaaaagtaatgaaactggggacattacaactgaccctacagaagtacaaaataacatttgagattattataaacacctgtatgcatgcaaactagaaaaccttgaggacaacctagattaggagggttataagtttccaggaatttatccatttattctaggttttctatttgtgtgcattaaaccaggaagaaatagaaatcctgaacagaccaaaggtaagcagcaaggttgaatcagtaataaggaaaaattgtcaacaacaaaaatgcccaaggccaggtggcatcacggatcatttctaccaggcattcaaagaagatttgataccaaccctagtgaaattattccaaaaggtagacaaagagggaatcctctttaaatctttctattaagccagtatcaccctgacaccaaaactaggaaaggacctaaccaaaaaggaaaactatagactaatattcctgatgaacatagatgcaaaatcctcaacaaagtactaacttaccaaatccaataacacatcaagaagatatatacaatgatcaagtgggtttcatctcagggatacagggatagtttaatatatgcaagtcaatcaatgtgatatattatataaacagaatgaaaaacagaaaccgtatgatcatctcaatagatgcagaaaaaacatttgataagatccaggatcgctttaagataaaaatgctcaacaaactgggcctagaagggacttacctcaaattattgaaagacatatatgacaaacccacagccaacattattactggatagataaaagttgaaagcattctccctgagaactggaagaagacagggatgcccactttcaccacttctttttttttctttttttttaaattatactttaagctctagggtatatatgcacaatgtgcaggtttgttaaataggtatacatgtgccatgttggtgtgctgcacccattaactcgtcatttacatttggtatatctcctaatgctatccctcccccatcccctcaccccacaacagaccccgatgtgggatggtccccttcctgtgtccaagtgtctcattgttcagttaccgcctatgagtgagaacatgcggtgtttggttttttgtccttgcgatagtttgctgagaatggtagtttccagcttcatccatttccctacagaggacatgaactcatcattttttatggctgcatagttttccatggtgtatatgtgccacattttcttaatccagtgtatcattgatggacatttgggttggttccaagtctttgctatcgtgaacagtgctgcaataaacatacgtgtgcatgtgtctttatagcagcatgatttataatcctttgggtatatacccagtaatgggatggctgggtcaaatggtatttctagttctagacccttgaggaattgccacactgtcttccacaatgattgaactaggttatagtcccaccaacagagtaaaagtgttcctatttctccacatcctctccagcacctgttgtttcctgactttttaatgatcgccattctaactgtgtgagatggtatctcattgtggttttgatttgcatttctctgatggccagtgatgataagcattttttcatgtgttttttggctgcataaatgtcttcttttgagaagtgtctgttcatatccttcacccactttttgatggggtcgtttgtttttttcttgtaaatttgtttgagttcattgtagattctggatattagccctttgtcagatgagtagattgcaaaaattttctcccattctgtaggttgtctgttcactctgatcatagtttcttttgctgcgcagaagctctttagtttaattagattccatttatcaattttgtcttttgttgccattgcttttggtgttttagacatgaagtcgttgcccatgcctatgtccttaatggtattgcctaggttttcttctagggtttttatggttttaggtctaacatttaagtctttaatccatcttgaattaatttttgtataaggtgtaagtaagggatctagtttcagctttctacatatggctagccagttttcccagcaccatttattaaataaggaatcctttccacatttcttgtttctgtcaggtttgtcaaagatcagatggttgtagatgtgtggtattatttctgcgggctctcttctgttccattctctatatctctgttttggtaccaataccatgctgttttggttactgttgccttgtactatagtttgaagtcaggtactggaagtcctattctgaacaatcaggcaagagacagaaagaaaggacaccacttctattcaacatagtactggaagtcctattctgaacaatcaggcaagagaaagaaagaaaggacatccaaataggaaaagtggaaatcaaactatcatggttcactgctgatataattgtatacctataaagaactaaggactcatccaaaagactccaagatctgataaacaaattcagcaatgtctaaggttccaagatcaatgcatacaaatcagtagcattgctgtacatcaccaacaaccaagctgagaatcaaatcaataactgaatttgctttacaacaattgcaaaaaatattaaatacataggaatatatttaaccaagacagtgaaagatctctacaaggagaactacaaaacactgctgaagtaaattatagatgacacaaacaaataaaaacacatctcatgcccatggattggaagaatcagtattgtaaaagtgaccacactgcccaaagcaatctaaagattcaatgcaattcccgttttaaaaaccacattattttttcaagaattagaaaagacattcttaaagttcatatggaaccaaaaaggagcctggatagacaaagaaatcctgagcaaaaagaacaactctggaggcatcaagttactggacttcaagttttacttcaaggctatatttagcaaaacagcatggtactggcataaaagtaggcacatagagaactggaacagattagagaacccagaaataaagctaaatacttagaaccaactgatcttcaacaaagaattcaaaaacgtaaattgaggaaagtacgctttatttaataagtgatgatgggaaaactggcaagtcacatgcaggagaatgaaactggatccctgtctctcacctcatactaaaatctactcaagatgtatcagagacttaaatgtaagacctgaaaccataaaatttctagaagaaaacctaggaaaaactcctctggacattggcttcggcaaagaatttatgactaaaaccacaaaagcaaatgcaacgaaaataaaaaaaatatatgagatctgattaaattaaaaatcttctgcacagcaaaagaaataatcatcaaagtaaacaaacaactcacagcatggaataaaatatttgaaacctatacatccgacaaaggactactatccagaatatacaaggaactcaaacaaatcagcaataaaaaaaataaatctttccatcaaaaagtgggcaaatgacataaatagcctgaaagaagatatacaaatggccaacaatcatatgaaaaaatgctcaacatcagtaatcatcagggaaatgctaattaaaaccataatgagattccaccttactcctgcaagaatggtcgttattgaaaagtcaaaaaacaatagatgttggcatggatgtggtgaaaggggaacacttatacactactggtgggaatataaattagtacaacctctatggaaaacggtatgaagattctttgaagagctaaaagtagatctaccattcaattcagcaattccagtactgggcatctacccaaaggaaaataagtggttatgtgaaaaagacacatgcacatgtatgtttactacagcctaattcacaattacaaaaacatggaaccagccgaagtgtccatcagtcaatgattggataaagaaaatgtggtatatatacacggtggcatattactcagccataaatggaataaaataatgttaatttgcagcaacttggttggagctggaggtcattattctaagtgaagtaactcacgaatggaaaatcaaacaccatatgttctcacttataagtgggagccaagttatgagtatacaaaggcatatagagtgatataatggaccttggagtctccaagggagaagggtgagagggagtatatgcgataaaaaaaagaactacatattgggtgcaatgtacactactcagatgataggtgcattgaaatctcagaattcagcactatataattgacccatgtaaccaaataccactagtactcccaaaacaattgaaatctgaaaatatattaattaaaaaataatgttacctacttcaacagattataattaagattatattacataatcctgacaaacagtacagtgagtattaaaatttctcagtaaatattagctataatataattattagactatttttcattagcttagagagaagtttcgccattgatagaagtgaggttaagaacagaggctgtcaaagtgtgacctccagagcagtagcattagcatcctgggaacttgtcagaaacaaatttctgggtcccaggcagctcttactgaatcaaaaactctgcagcaatttgggtttttagcaaattctccaagtaattatgattcatgcaaaaatttgggaaccattgaatctgacagctgatacaagtatttccaatctgcataaatattttgaattcaatcatttgtcttttcttgaagtggactgatcacatcacttaaaaaataatcatattaattgcatgcacaatatccttagtattccaaaatttacttgtcttctaaattttctttgttacctgtcagaacaatattatcaaaataacaataatctaatcattcaaatatagacagatgatagacagatgatagattataaataaagtgtgaaataggctacatggtttgtaacctcaataattatacagttttttatatgtgacaaaacactcacgtgtaaataatattgtagtcattgtatatcaaaataaggataataatcaaaaagttaaaaaaattttaaaaactgagcatttataatgtatggcttgccatgaagtaatgttttcagctttaaaaatgtttaagttacgtacacacatctatatatacacacatctatatatatatatatatatatacacatacacatatatatgaataatttattccaataattaaaaaataatgaatttggtctagctaaatataggtgcattttagaaatagataagaaattgtaaaaatatcagccaattgttaaactcacagtctttgattacctgaaagaattctgtgcctggccgggcacagtggctcacacctgtaatcccagcactttgggaggccaaggtgggcagatcacctgaggtcaggagtttgagacaagcctggctaacatggtgaaaccctgtctttactaaaaatacaaaaattagctgggcttgctggcgtgcgcctgtagtcccagctacttaggaggctgaggcaagagaatcacttgaacccaggaagcggatgttgcagtgagccgagattgcaccactgcactccagtctgggcaacagagcgagactctatctcaaaaaaaaaaaaaaaaaaaaaaaagaagagaattctgtgccttttatccctgtctgtttatgtgtgcatgtgcatgtgcagatccagtctcagaaaagtataagaatgcaaacaccgcatattctcactcataggtgggaattgaacaatgagaacacatggacacaggaaggggaacatcacactctggggactgttgtggggtggggggaggggggagggatagctttaggagatatacctaatgctaaatgacgagttaatgggtgcagcacaccagcatggcacatgcatacatatataactaacctacacattgtgcacatgtaccctaaaacttaaagtataataataataaaaaaaagaatgcttgcttacaaattgtgtttctttagcacttaatgttgttttgtgtttttcaaaaaaacagcatccaaatatactggttgacaatttgtttccagtttttttctataaatgacaaataggatatttaatttttgtctagcgtagagaagaaacattataattttgacaaaaatatggtttcacctttcatataaaattctaaacccggtagcacacttacctgaaaggtgagaaatatgacattgccccagtaagtgacaacatctgtggtgctatcacaaggctaaattcctttattgtgtcttttataagatactgttaagtctagcaaaataccattttgagatgctacttaaacgtggctcagaataaataaaaaattgtcaaagaaacgttttaaattaacacttctgattttaaaatataaagcaatcaaagacagtggttttccaacgtgaacacaccgggtatcagaggagtattattgaggcaatgtaaagagtatgacagaaatcactgacacagccactagggatgcacgaagccattcataagatatgtcattggtgtattttatctgctccacttacaataaatcctatgttcttgaaagaatgtcatatttatactctcaggaactgccttgttagtcatgtagtttagtaacagtgccaaaaatagttcagactttcttgaccttctctgtctagcatataaaccttaacctggaaggagcagctttgaagtcagagggcagttatagatctgtctgattctgatccttagtttctctactgagattgcaaacactcacttgatatattacataaaatattctttcatactccatcatgaacagtacaaatagtatttaaacccatcatatctttccaaatatcacttgtgcaattataatatgtttttcttttagaaggaatacattgtctttcataattatataaaattaaaaattgtgttacacaacatgagttgtttacttctatgagctgtgcaacgtttgatgatgtcctttttgaggacacaaaagcagatattgacatgcagtatcatgcatgtgttcttagagaagagtttaaatatgaagatgatggtatagccatcagttgggatctcaaataaattgtttaataagtgtatttctatattcaaaaggctgaaataaacttaaatcttttatggcattgcccttttatgaattggcttagcttatgtattctaaatgcccataagtgatattttttggcttcttacttctttataaccaatcaaattacatttataaaagattatttaaataacattatcaactaatataaatatttcaaatgtctagcaaggctgtaatttatatattcaaatatatcgttctaaaaatatttgtacaaagatagaaataatattaggtcacgcataatgtatgtagtgactaaattaaaaagaaagaggaattaggtataaaattccattattctccaccatactttcctatgtgttataaaatttaagcaaatatgtcttcaagtcatgttacattatcttcatagtaaattaattttttcaatcactgtgagtaaattgagacataactgataatttggaattagttatataattaattttgtcagtgcattacaatttttaagagaccgtctgtctataaaaggatcttaagaaattagattggaaaattactattataacattctaaaagcataatattagaactacaagaccttaattatttagcacgaatcaagtgacctgacaaactcaaagtgctaaattggcaatctgtttacccgagtattttcagtaagttttgtctactttataagaagactgacagggattgctttttgctatgagacagccaagatgacctttgagttccctcctgaattctgaagaagaaacaagtaagatggacaggcttggtcaattctgataatcaaagggccacttgacatttttagtgaagagaaatagaaattctaacgagaatgtttggataatactaattaaggtgagcttggtggtataaaagttatcacacccactctcaagggccacagacacaagtcacaaataaacttagatattgaatagtgaaaagatggtgaatacaattggaactggagaagcagagtgaagaattaactccaaattgactaaattgtcaaagtctaaattcttaaccctgaatctaattaaacaacaggtgataatggttaatttaaaaatggatgcttagttaattagctatatccgagcataataccattttagtagcaagtaaaaaccataattatattaatagcagatttctaacacttaatttgttgatatcctaattataggatttgttttaactttatgaaagaaaatgaagcatctaagtctgcttttaacaaaataactcatgttcttcagggcatatgacaaaaatctatttcagtgtaaacattagtgagaaaatatccacagagagtaaagcccatgaagttagtaaaatagttttattattttgtgatactatatagctaaattaaattggctacattgtttcataaatacatctagtgtggagagagagagagagtgagagagagatagagagagactatgtatatttaaatgtgtaaagaagaagcagaccattctgctcttttgttcatgcaactctctatctgctcacttaaagacacattggcatttgagacctaaaattgttactttgttgttgaaataaagaatgaacggaaagtcaaggacattgattttgatgacaatattgtcaagatctgtattttaggaggaagtatgtaatatttttattttataaaaaagtagatctttagggagaatgcatttagggcaacttgaatctgtctcctcagtttaaaaaaataaaagatctttggcaatttactaaatagttcatttattttgagtagtgattactagatatttatcatcaataaattctatcagtttgaattttaaaagtaaataagccccaaattctaaaaatttaagtttaaattttatacagttttacaaaactaagaattatcaaataaaaaatgcatggtccaagagcttctaaagctttgaaaatgtttagtatttatatgtcatgtaatgtgcattggacactaggttgtttccttcagagcggacccagttagcattcattcatttttccaaacatcacataattgactcttaaaattgctacttagttcatctaaatttattttcaacattcttctagaaaatctggagctggggtttctcaaattattatctgaagtcatgtagaaacaaacatttcaacacttaaaaaacttttacgaattaaaatcaattattcacaactaaaagaaaattagccattacttcattttacagacaagtcggggaatatatgctgtgttgttgaaatggcaaacataatttctgcagtgtaatacaatggaaagaaaagacagatatttttggttactgtcttggttttgtcttctcaaaaaaacaaaaaacaaaaaaaaaaaaacaagaaaaaaccagtttgctctatgaggattgctcataacttttttgcagctctcacaacattaaaaaaaataaagttggagtttattctgtatgtaaaatattggcattaatgtggattaatttaaaagattggtgaggttaaaatttcctaatattattataattgttattataggtatattaattaaatatttatttggggtggtagagattagagaggtaaaggtaggaggagagaaacagggaattaggaaagaactggtatagataagaacaaagtaggagataaagcagattggaacaaaagagacatttatatcaaggggacaaaaaggccccataatggaccgttaacaaaaaaaaatcaaatattccattatttcttcagaatatgttaattgagtggataaaatggaataaatatttttggtgtatagattataccattgatcaagggagacttggacttgcctcaaacgtatgttcagttaccaggttttaaatactgattcagaaataaactcccctatgaatctttgccatacataaaatgtgggagtagatataacctgctctgattgaagaaatatgaatattaatatgcccaaatgtaaggacttcaacatggtggaaggattagtcaacagcaggagaggctgggaagacagaggatttagagacatacatgtaagagatcaagaggctttccatattactaatttgacttgatttttaagtcaaggttggatcactaaaagactttatgcagtagccttatattgtttaactggaattttttaaaagattactttgggcacaactttgaaatggattggagctgagtgataggtggaattctaagatgactcccaagtaccactcactgctgtgaacactcttgtgtaatcctttccacttgagtgcaggtaggaactcatagctttgagccgacagactctggcaatatttttgcagatgtcattaggatctttaataaactgactttaacttaataaagaggaagattatacagagtaggccctatttaatcagatgagccctttaaaaagagatcagagctttcctgaaatgagactccaaagaacagcaagtttgtctgattgattggcttagtccactttttcttttgttgctataaaagaatacctgaggcttggtaatttataaagaaaaaaaggcatttacttggttcatgattctgatgactggaaagttcaagattgggcttctgcatctgttgagggcctcagaatgcttccactcatggcagaaggcaaacaagaacagagatcacatggtgggagaagagaaaagagaagcaggggaaggtgccaggctctttttttagtaaccagttctctcagaaactaatagaatgagaacttagtcttaaaggaggacattcatctatttatgagggattcactcctgtgactcaaatatctcccatttggcccctcctccaacattggaaatcaaaacttagtatgaggtttgtacaggaaaaacagctgaaccatagcactgcccttgaagaagcaggtttcatgttctcagggggactgtgagaggaccagtgaaggggctttggagtaaagaccagggagcaacctgtaaagctgagagtaggctctggctgacagccagtgagaaaataggaacttctgcctacaatctacaaccacaaggaagtgaattctgccagcaaccaggtgaatttggaagaggtgacccaagctgcagagaaatatgcaacaaacagaaattgtgatgatatccttgtgagatcaggagcggagtgcacagttaagccatatccacactcctgacccacaaaactgtgaaaaaatttaaagagtgttgttttaactatacatttgcagtgatttgtcaggtagaaatagaaaaccaatacaatttgcatataatttaaagaggaaagttaaaagaagatagagaaaattgtgagctcaaagaaatagtttcagatcagcatatcctactctatacagtagtagtatctaaccctttagtaataaatagtaccatagtaataagttagattattgatcttatgctttgctatatcttggatcaggtacttcagtgtatttgtatcacctgtttttttgaaatcttcaactccctgactttgtaacgctgcatggaaaatccaagtgtagactgattatttggactacagtggcagtgactggtgatttttatatttgccaaaaatgattactaagtttggaggtagatattttccacttctcaaaaatttttacaaagttacttgtgtaatctcttgagtataagtattccatacatacttcaagtaaatgtgtgagttttcatttctattcaataaagtagaatgaatcgtcctaggtgtcttctgagtctttactttcagaataagaataatatacttctgcttttctaaaattttaataatgagttaacacaacactcagaatcaaagaccaaaaaactacagcttccttcctcatcttaggcctttttctacctgggtaagaattctataaaattgcaaaattaaaggttttcctaaaatacgtctatttgttgaagattttaatagaaataataatgtaatgttgtcaagaaaataaattttatatcctatgtttgtacttctaaataattgtatagcctgtggcaatttgctcaccctccttgttacttagtttagttagcagataaaatggatacaattttattaccttactccatggtaatttcagcctaaactgaatttaaaaatgagattaaatgtggatatctatgtggctatttccagttctaaaatgtataactccgttaatatatgcattaatatataacattataaagttgcatatgaatatctaatatttgtaatgggcatttatgaagaacacttttttattgatgtttttctagctactcttctcctatttaacttggatcctcactaattacccctgataaattacagtagataactattgtaaaagacactagttaaggtgaacttagggagtaaaaaaaatgtcatataatcttctcccactaaatatggacaaaatctctgactttcttctaagcaaatgaatatggcaaagttgaagtgatattgcagatgtaattaaggttcctaaccagttatttaggcctaaccttaacaagtgaactttttaaagagtgcgtaggctatcttggagattacagactcaaagcaatagactctctatcaatattgtttgatttaaagcaccaagcatccatgaacctacagctccaagaaaataaattctgcaaaaaacctgagagagcttgtaatggaatccttccctattcaaatgcaacctagttgacaccttgatttttatcttggtgagacctttcagagaaaccagctaggtcctgcccagacttctgaccaataaaaactaagttgtaataacttagtttttaaggtaataaatgggcattgctttaagtcactgagtgcattagtcaatgttctccagagaaatagaatcaataagatacacatagacagacacacacacacacacacacacacaaactatttatacagtaattgacccatgagattacagaggctgagaagtcctgcagtatgccattattaaggtggagaatggggaaagccagtggtataattcagttcaaatcaaaaggcttgagaaccagagaaacaaacagtcccagtacagtcccaaaggcctaagaaccagaagcgataaggtttggtgtcaggagaagttccatgttcctgctcaaacagataaaccatttcccttcctctgctttttgttctatttggcccctcagtggattggatgatgcctgcacacattgatgagcatggcttccctttactcagcctgttatttcacatgctactcccttccagaaacacactgacacatccaaaaatgttttaacagctatccgggcattcattaacccagttatgttgacacacgaaattggccatcacactaagtttatggttaactttttttgtgcagcaatagaaaacaaatacaaccactgcatttacatttttagaactaacctccttcctgaactccttacagatatttccaaatggctacagacatccctaccattaatctccctgtcatgtcaaactttcccaactcaattttgacctgttgttcttgtcctttgaatgttatctttagttaacaataccaaaccaaccagccaatttagaaatacagactcaatcaaacaactaaataaatgacctggattgtatctatccttatatttttgctttaattaacatgtccactctatcactcctgatggtatctgtgagtatatacctggctactacctcaaacatttcttgagttcttcctagttatctctcctatcctgccacaagttggcccctattccttgtctgaagaggcttccctgccaaagaaattgccctctgagatatttaaagcatgagatcacatacacataaaataatgttcttctaaaatatcagaccctcttataaatacgggcaaacttgttcatgattctctacctaccaagttcccaattagaatatccaggcaagaagttactgttggggcagaattacccactcttccccagttctgtatttattttattgtatatgtcatgcttattgcaaaatatgtgttaacatggctctttctccttatgaaatataaccctcaagaacaaaggagatatctttgtattacaacatttgcactgtggtaaacacatcataaatacttagtaaatattgtttgcatgaataagcaaatataaaattactattacaatcacacacaggcatttcttgcaattatgtataatggctataggtcaatttgcaaaagaaaaaacaatttgcttaatagctaatttgttaatggttcattcatcaagttttctaatacatgaattaaaaataatgttccttgtgtttatagagtttataaagttttgtatggactgggatataacagtttttagggtgcctaaaaatacttttaaaattttatttggttttatttattttctaaaagcattttttaaaccactgctgcatcaaaactaagaattacagcatggtttggtttcctaacaatatttactaaatttaattaatacataacaaacatcacttcaatattttgtaagtgaacatttcagtttgtaattattttgtacaacttttaaatgttattttcctaaagaatattttaaacttaatatcttatttctggcaaaaattaggccatatggggtacactgtttttatcttctgttttattattttacccaactttaacaatttggggatttttaataaatgcatctttaattatttttttcaaaatatcattacaaatgtgcccatcagatttgaggtgataattgtagcaattcttatggtaatctattgcaattaactgacaaaacataaaaatttacaaagattagaatggatcatagggaatcattccatatcttgactatatcaatgtcaatatctttttgtgaaattatactatagctatgaaacctgttattattgggaaaagttgaaagtatctatagaatcttccttttttgctttttaatctttttgtataaatttatggggcacaagtgtggttttattacacgaataaattgcatagtcatgaagtcacagctttcaggatatcaatcacccaaataacatacattgtacctatttcataatttctcatcaccaaccaccccccgccttcccatccttccaaatctccgttgtctatcattccacactctaaatccacgtgtacccaggttttggctcccacttataagtgagaacatgtggatttgtctttctgtgtcagagtttcactcacaataatgacctccagttttatccatgttgctgcaaaagatatgattcattctttgtaatgaatgaatagtattccattatgtacatataccatattttctttatcgaatcatccattaatggacacttagattgattccatatctttgctattgtgaatagtactgtgataaacttatgagtactggtgttcttttgatatattaattttttttcttttaatagatacccagcagagggattgctgaattgaatggtagttctatttttagttcattgagaaatcttcatactatagagattctagtaattgacgttttaccaacaatgtgtaagcattccctttttttctgcatcctagccaacatctatttttttctttttagtaatagccattctaatgaatgtaagatgacatctcattgtggctttaatttgcatgcctctgataattagtgatatggagcatttttcttcatttgcttgttggccatttgtatgtcttttgaaaaatgtctgctcatgtcttttgcccgcattttaatgagattatttctttcctcattgttgttgggttgttaagttccatgtagattctgaatattagctccctgttgactatatagttagtaaatattttctcgctttctgcgggttgtctgttcactctgttgattatttcctttgttatgcaggagctttttcagtttaagtaagtcctatttgtttcatttttattgcctgtacttttgaggacttagtcataaattcttgtctagactaatgtctagaaaatatttccctaggttttctgctggtatatttatagtttcaggtgttacatttcagtctttaacccattttgaattgattttggtatatcgtgagagatacaggtacagtttgacacttctgcatatgtcaatccaattttcccagcaccacttattgaaaaacttgtcctgtatttttaaaaattaatgtgaatctacaattatttcaaaatataatttttataaaaattctggaaaatttgtgctcattgtcatcagttcctcaaaaatcctttttcttaaacctatcccacataggcttttgtccctaacaatttacttacccttatcctttccagataaaaaatgacctctacacttaattttcactcctcatcttacttgaaacagataattgattcttccttcttgatagcatttttttttttttttttgagatggagtctcactctgtcaccaggctggagtgcagtagcgtgatcttggctcactgcaacttccacctcccgggttcaagcaattctcctggcccagcctcccgagtagctgggattacaggcacgcaccaccacatccagctaatttttttatttttagtagagacggggtttcaccatgttggccaggatggtcccaatctccttgacctcttaatctgcccgtcttgggcggatcccaaagtgctgggattgcaggcgtgagccaccgcgcccagacttgatagctttttaaaaggcttgcagggcagcatatttccttgcttttacacatactgaattttttgtcctcagtctcttttgttgacttttccctttttttaattagcattggaattctctagttctcctctatatgtaaagatgggagtatcacttttctcgtcatcttaatcaggctcatggcttttaatactgcatagcttctggtaactcccctgtacaactctccatctcagaactgtcttccaaacaccagactcctacatctagctgcctcttgtacacacgtcagacacctcaatctcagaatccaaaacagaactctgatcttccccagcaaacagttttatatatagacttctttattacattacttaaaaattctcctttcattgataagaatttatttcatcttaacctctcagtcaaaaatctataacttctacactgctgaggtttttccccctcaaatcctactttcaatgtatcagtaaattctcacttaaccattttttttgaccctctagctgactttattgaattgctttcttatttccataagttttaggctgtaccaacaaatatcaaaaacaatagaaaattacattagaggcaaacattatacacacaatgggataaactagacatgaagctatatttttattcagagcacaagtacacagacaaatatgaagcaaaaacagtgagccgacaaaaatgagatcatcttagtgtaaaaaataagtgagcagcaaaataaagatgaaactgagagtactcttaacaaaaaattctgttattacaaatattgacaggcagcagattatttgactaaaagaatcagtcacatatttgacacagttaacagaaatttccctctatttcaattcacctttcttttctttctttcataaactatgactgtagcagctttttaaaaagttttaaaatacgattcaagtgaaacaggcacaggtgtcttttttcatgtaaatcagttaaaagccaagtggccagaaaaaatatataaaaataacaatctatcaagttttgggaaaagtacatgcatcctaaaagaatagtactatgttttttcatatagcagatttattctgtttctcctacaattttaaatgttttcactgccaaagttagacgtaaatttgctagattagccccatggtcagtaatagtttgtacttttgtattgtagtctgaaaatgtaactctaaccccacaggcctgaaacctggtgggaaaatgatcgataagtgttttagattgaacagtcttactacgtatgacttatctattaaaatgaagaactttcatggtttaatagaatgactgctgtattcaactacaacaaggtcttccatccttcttataaatcttaagaatgtgtttaaggtttctttcacctttactctatcccatggaagttaattgggaataaaaagatttatcaattcagtcactataatttaagaccaggcatctgcttagaaatacaataaccacaattcatacttagagaaaattgtttcatttaaccattttttaaaaaatatatacagaatccaaacacttcttaccactttaatgattgctttcctcatctgagccaccaacatctctcactgccagagttgtaataacaatatttagtgaaattgcaaatgagagtatgaaatgattgtgatcaaaattctgcaatggtttctcattttttcaacgtgtaagcctattggtcaaaataatctcatttctaggctgggtgcagtgactcacgcctgtaattccagaactttgggaggccaaggtgggcagatcacaagaccaagagattgagaccatcctggccaacatggtgaaaccccgtctctactaaaaatacaaaaattagctggatgtggtggcatgccactgtagtcccagctactcgggaggctgaggcaggagaatcgcttgaatccaggaggtggaggttgcagcgagccgagatcgcgccactgcactcgagcctcgcgacagagcaagactctgcccccccccgcaaaaaaaaagatctcatttctgattttatattttactattttcttttataagatgtttcagcccctctgaatccattgttttatctaaaaaaaaaaatactaggtatacttcctgccgggtgtagtggctcacaccgtaatcccagcattctgggaggctgaggaaagtggatcacgaggtcaggagttcgagacgagactggccacgatggtgaaacccgtctctaccaaaaatataaaaaaattagctgggcatggtgaggcatgtctgtattcccagctactcaggagggtgaggcaggagaatcgcttgaacccagcaggtggaggtagcagtgagccgagaccaccactacactccagcctgggcgacagagggagactccatctcaaaaaataaataaataaatactaggtatacttccaccctatggtttaaccattggcttattcttctcttggaatgcttttatacccaggtaaaccttcaaaattcatgtttttaatatggccagctctgacagttctatttgatactgaaaattgtctattcccaatacgtcccattaatgcttcattcctggcaatcctaaatgctcttagattgttttctatattttgtagcacatcttctattaacgtgtaattatgttataatggtttttattttctactttacattgccccctttatataagctgtatataattgagaactttattttgttctttaatattcaatcacctagaagggcacctagaacataatatgcctcagatatttttgaatacatctattgattaaagaattaaaaatttaacaaaatatatatttaatttatcaatcagttatgctttcaattaaaaatacactaagtgcttattgtattctaatagttcttttgattcaactaaacaaaagagagaataaagagattaaaaaatgaaagggatttgagccctatggatggagagacgctaaagtagatattagcaccaatattcagaatttggaaaacaggtgagcttttcctgaactggtgaataaagaaaatcgatgcttaacatgaatgcaatcatatttatctcctaagaactccagacatgtacaggaagtaaaaggtccatgtaaaactttaaaacatgggcttataaaaggaggtggaaacgggatgacaggttaacaatgcaattgaaatccctgttcccactcagtataaccaagcatatctacacagacttcggaagatagaaattcaaaattattgtaagcaaacacattctcttaagacaagaaatggaaagatttctctcaggtgaagccattcagccaaaaagataaaactaaatctactaatagttgtagttgcctactaatagttgaaaatgtccaacctaattcacctcctcagagactaattgaaaaattttgtgtctatgaagcttgcagtatactagtgatacaaaaatatgattagttatgcaggcttcactatccatttgaataaaagtcagagtttgaaaaacactgaaaaacaaatttaaaaaaataagaaaatattcttctgtgaaatttagggagaaaattttatccatgaaaccaagataagaagaaacattcagagaataaaaagagcttatggaaattaaagtaagaatgtagtaaaataattcaatgtaaggattaggtcaagttaaagaaatctataaaacacagggaatttgatacacattataaaacaattaagaattcaatgatttgattcattgatgtccaacactttaataataaaaatttagatcttcaactcatattgtgaaaatgagagtagaaatactatgaaactaataattcagaagaatatcttgaagacaagccaatacgttgtgaaatttcagaataaagtagacaaagagggatttcatatttttagagagaatataaaggcaatggaagattacttgcaaaggactagaaagtaaaacagcatggagcttccgaacagagagaccaaatttcaagatcataaaacaatgcattcaaaattctaaacaaatttgcttctaaggggaagacaaaaggaaattaaattgatatcattcttgtggtctatcaaatagagagctatcttccaataatgagggatggattcatgaaaagtatatagaacactaataaattaagtaacaaaagtatttactccaggaaataacaaaagttgtataggaaaggaaaattaccataacctagctctaaaaacttttcatgctcataaacatgtgctcataacagtggaaaacttgaacattgattgttttaactaaagcagtactggagctatattggaaagtaggtagaaagacatgcatgtgaaagggagaatgaggaatctaacaaatgcaagtgtgcctttttactttaggatgtagagaaaatataaatttaaaaatgaagaaaacaaattataatcaggccatttccaaatacaaaggtatattgagaaaaacgggggcaaatctcaagaggtttcaattggttgctcttcgaacttcaggtcatggctcatttcactgcaatggcctaggggctggtttttattgtaatcttccaaaaataattagattgtttatattatacaatgtaagacttcagtaaaaataatggtaaaaataactatccttataatttcactctatcttttgttggaaaggagaatgtttatcgccttttgttttaagaactatcactttataggcttctttcctatttccttttctaactctagtgctcagtttctgccatagacacttgaggtttaatgtaagattgttactgtcattttgtcagttgcttcctgaaaggcatggtgttctaatttcacagctgtgcaacttataaaatactgtgatgtaacctttaattgccatgtgaagtaaaaaaagaaaaaatgttggaataaacattggatccataataacatttttaattatttttctcctggtgaccaaggtgcttgactaagccttctaaatcatttttgacaaccacatgtattatttatatcatgactcggtatgattcttagaaatgaacaggtaaaaagaaggggaattgaacacaggaagaatttaagttttttaaaggaatctgcgtacacctgcagtcacagaaatattaacattgataaaaatttcctactgcttatagtgtgggatatattttggagatacacaggcatgaataaagttcatttatctgataagaacaaagacaaaatcaagaacgacatctcttttcttaccaaccataatgaattgtattgaatacaccagttcttcacccctcgctgtatgtaaccccttggccttgtttcttttgctgtactctcttttctgactctgggcttgatcatggtacttgatttgtcagcacaatgaggtggaaatgactgtctattcaagcttgaggccttaagaagatttcagtggttatgcttgctcttttatgcttctgtgattgccatgtgattgtggcaggactagactgttggaagactggaagacgagagacagagatgtggaagttgaaataagactggcctgaatcatgaaaagccagctgagccacagccaccaagacctactgcttgtgccctccagagctgcaccctctgccatacttagaccgtcttgagtcacaactagggcagccaagaagtgcaacacgggaatgtggggtcaaagaaagactggagatggccctgggcagcaagtcctgagggcccacagtcaccttgaacccttctgctctcaaagccctggcactctgggtctgtactgggcatgacagccttgagtatctctgaaatgcctttgcagtcattctctcatggtgttgatgaatagctcttggcttctttttttctttttttttttgatggggtctcacgctctgtcgcccaggctggagtgcagtggcgcgatctcggctccctgcaagctccgcctccccggttcataccattctcctgcctcagcctcccgagtagctggaactacaggcacccgccaccacgcccggctaatttttttgtatttttagtagagacggggtttcaccgtgttagccaggatggtctccatctcctgacctcatgatcctcccgcctcggcctcccaaagtgctgagattacaggcgtgagccaccgcgcccggccagctcttggcttttttatgttcacaataagagctgccctaaagtaaacttcaattacactgaggtaagggcaaagatgccaaatgtacctgcacaagagagcctgccaggggttgtatttcaattctttccaggagaattgacaggagtaaaatagcttcaacagagagaacagtgagtggacagccagaacaccgggggtgaaagacaactcaaaaggggccgggcaggtcctaggcaagatgagcttcagacttgctgagggcaatgacctccgtgggagaacagcaaccagaaacacacacatccattgcagttttgaaaaactgtagtttagttgaggtcactaccttgggtgggggatgctggatggctgccctgggctctgggtttcacctgggcaaggggagtacagaaaacattgcatctcactcctcttttctgtgtatcataaaattttaagttaaatttttgatgtttaattatcccctaaaatgtctgataaaagattaacgacttttcaaggttggataaatttggatgactccattaacaaaggaagttgctaaaaatctacattgctttggagatggcctggttttatgcagaggccatatttgattcatcatcctccctaatgtggaatctttaaggtgttttcattttttttcttgttcatccattatacttttgataatatttaattacatgagttagatttctaggcatgaaatgagtggaatggcttaagtcctatttttgagttgatttccagaaatgttatggtaattaacatttctagcaacctattaatgccaatttccactatcattgtgaattaccatatttaacaaagttttggtgtcagagatatgaagatatgcttttttttctttcttcctttctcttttaactcttactttctccattcctccttccttctcttcttccctttctccttccctctgttccctcttttatctcttttctttcttcctctcttcttttttcctcctaatccacccttccaatttgtttttattaagactagtaagcctgaatggattatcacaacattttcagagatttgtatatattattctgtatttttactattcatttattttctctgtgctctattttggttttatatgttttttaactttaatgttttattattcatttatgagtcctctatatctaagatatataaactcatgtttatttgttgcacctatttctacagttgctcttatcttttaacatttttatgtattactgtgcaatgtttcaaattttcatggcatcaaatttatcatttgttacctttaatgttgaaaacactttacatatttatggatcaatgtaatatcatcttaattaaaagaaaaatgaatattaaaagaagacaagcattcaataaaaaatgaagtacctacttccaaaaaaactaagaagcagtgagtacacacaataaaataagatttatattccatagcttcaaatggaaaaagaatgcaaatttaaaacaggtgaataattttgagcaatgaggttagaagggacctcaaagtgcactagacacgaagcaggatacttagacagtaccatcctgtgatctaagcaagagaggctcaattcttagatcagggctttagtgatcctaaccatgaaccatctgcccagcaactgtagcactgaggggataccctcacatagagcctgaacctctttcccaaaatatgatctgggaccttggcattccccacccaattggccaagccttctccctggccctctgccttgtctttctgagagcctcattggtgtgcacattcagaggccaaaggaatgatggaagggggtgtaggtggagccagctatgtggattttgttgtctaaatgtttggtcacaagggcaaaagacagatgcagtcaagcatgagaagtaaagaatgcacaggatgtgaactggtgcaggacagttttctggatgtctttgagccagttcagttatccttcctttcttccttgtagtcttcagaataactgtggaatttgctgggaatgtaatatcttaaaataaagagtagctagtcagaatagctatgttcctgtctctgacagaacaagatattctacaattcttcaaccagtgattcaaatttgctctcagggtataaatccaggacaggctgctttctgtggcccctcagctgtggtgcaggaggggcatactccgaaaatactccaactaccctgcacaactgtcctgaaccttgggggaccagcttgttatgaatcctggttttctactgtcccttacttcctatctgtgtgtaaggatccacttcctcatactatcacattggcaacacctgaatttttaaggggatgcatgcaaaccatagcaccttcctgtttgtgtgtcttaaatctcttgtgccttccactttacaggacaaagcacttcagtataatattttttggagatccttaacttaattacatcagcaaagatattatttccaaataaggtcacatccttagataatgagcattagaactgggcatatctttttagggggaacagggtctcaattcaaaccactacactatataaaaactaactttaaatataattttttaaaacatcaaacttatatccaaaactttgggtactacacttttctattataaatgtgacctttagtaaacctcatagtcactcaatatgaaaggtgacctgcgaaaatacctactctaacctcttttacagtttaggaaatagagaacataatttatgcattttgaagtcagaaataacacaatgtagaggcatcatcttagtacagatagcgtaggtcaaatctggttgccacacgtgacctctttgtcactgggtgatataacttcttgagtattaattttgtcatcttaaaattttgtattataatttttttattattattatactttcagttttagggtacatgggcacaatgtgcaggtttgttacatatgtatacatgtgccatgttggtgtgctgcaccttatagtgtaattaaaatgattaaatgaaataactcaatctactgcagaacttgctacagaatatttgctcaggatataatagatattattctgataaataagctattctgataaagagtcacatacagaaaatggcagaccctcttcttgatgcctcattcttggtcctattactccttttacattaaatgattgagccgtggattatcctgtgtgtgtgtgaaattttggctctaccagtattcccaaagcatcttaatattgtgatgctttatgaaatcctgatgtcagtcattccactttcttgatgtgcatattatgaaaggttggaaaaataaatttataggcacacacattaggaacaataaaaatagcagaaaaatagttctacctaatagaaatataggtagaaaatagaaatagttctacctaatagaaaaataacacgaaatattaccaatcttttcaaaagaaataaacattatctttctttggtaatgtatatgtaatgtttattcattcactggttattttcaagaaataaatcatgaacttctaaattgtgcatggaatcaagctagattgaaaaaaaggttttcccctcttattactgtgtagagtttagagtagaactgggagaaatattggaggtaggttacccttgtcttcctaggagaagcattatcacctagtaaactaatccctgctttgtgtactataaaaatatgctcataaatatcattaaaatattacacctaactgaagaaaaatatgttttaaagacatatttaaatatatgtccttaaacatatattttatgaaatatgaaacaaacatatttcatgattacttatagaaaatgtatatatatagatatcagattttccatttaatctttgtaaatttagattttgatttgtcaagcatacagatacgttacaaaggcgtcaagaaatttttatattctttctacccatattcaacaattacttgtatttcatcccattttagtcatattctctatccttctccctactctttccttcttcttctctacctttataccatctatctacctatccatctatcatcagtcgtttttcccatgtcctcaccataccatttaagagtgtgttcacttcctgtgacttcaatgacaaatcatcacttagtggtttaatagataactttgtggtttgaaaaaatagaaatttgttctctcacagacctggagaccagaattccaaagtcaagtttttggaaatgtcatgtttcccatagaagctataggaataaaatccattccatgcctcttccagcttctgaaagctgccagctttctttggcttgtggccacatcactctaatctctacttccttaatcacgatttcctctttttttctccccaaaattcattttgatcacttgtatggggatacaagcaattgcatttaggacccaccttggtaatcaaagatattctctttctctctagatccttaacttaattgcatcttttgccatataatgtaatattgacatgtgttgtggattaagaattttacatctttaggggtcttttctaatccaaccacaataagagatacagtgatcctttaaccttaattttcttcagtatatatttcctaagaagaagggtattctctcaaccatgcaacagatgacaaaaatcagacaattcaacattaataataattagtgtttccctagccatattaaagcctaagaaacaataaaaatcagtaatgttgatcctgtaagtatttaaaatttttatatcttatttatcttagtcctttcgagctgctacaacaaaaatactattgactgggtggcttaaacatatacttctgacagtcctagaggctgtgaagtctaagatcaaggtgctggcagattcagtgtctggtggagtcccacgtcctggttcatagagacgaatttcatgctgtttcctcacaaagcagaaagggaaagagagaactctctggatcccatttgtaagggcacaatcctgtttgtgaggacttcattttataaccttattatttcccaaagactcaccttctaataataccatcacactggggattacaagttcaccttttcattttggagggatacatgcagtttgttcagtttatcatgaatttttgcattgtttaaaatattacattcaaatattatttattgtgattgctaagtttttgtgccaccataagttttgtgcccaagacaaatgacaccctcacttcacaatatcccagtcttgatctacaggccatatctaaattttatcaatttttccaataccctcaataacaattttcttctatacagactcctattaggatcacgatagcacttctttgtttatctcttattctggagctattttcaacctttctttcgtttcttaatcttgatgttttgaagggtacaggccagttattttgtagaatgtctgtcaatttggatttattttctatttttcgtgtttgattcatgttacggtgtgtgtgtgttatggcaggagtatcactgaggtgatgtggctttttccacatattagaaaggacatgatattgctttgttccactattgatgacattaggtcaggttaagtttggtggcctgattaaagtggtatctaccatgtttatcacactataacattactatttttctctttataatcatgaaataatttgtggaatatccttagcaactatgtcttgttcatagtccaaatttgattcctgtactagcaaccactgacaattttctaattcatttgttactatacttacaactttttgtattatatgtataactttattttttacttaaaattcaactataaggaagatattttaattcctttcgtataaatgcatgcaagtatgtatgtatgttatatcaattcaggcattcatattttattcaatggtacattaaatttttcttagtatggttagtgaaagatcttccagctgccttttggatcattttgaggattccccataattgtttgagctttttccatatttttgatccaaacaagatgtaaaaatatcatctcgtgttttacatgctccaatctagggatcgacagtttgtcaaaaaatcttggtattttttttagtagagaatggcctctcttgtttctgatgatgtcagcttttatttctatcattttcttgtatttaatacgaaaatttcccatgacttctttcaatgttttctattcattttgggatgtcaccattttctgtcttatgtaccttggtgtggctgtatttctcctgcttgtagttcactgttcttgaatatttaagtttaggtttttcatcacatttaaaaaaatggttagtcattatttcttcaacataacttttcccaattctctttcttctcacccatgggaatgtaaatacacatataacatttaatattctcccaaaaaatactgactttaaaaatttttctctctcctatttgttacttaaattctatttatttatcttgacattgtcctacaaaccattgagtttctattatttttatttttttatattatttttatatattattttatatattgtataaatgctataaaattatcttcaacttaactgactccttttgttctatctataactttctggtttgcccattcagggaatataagagcatgaattataagagcatgagtcatacttttttgattcttcacatatctagtaatttctttgtatcgcatgttaggcaatccaaatatattgtagagattctggttccaataatatttatctgcaaatgatatttgtccaagaagtaaatttcaattgcctagacccaaacttcaaattctctctcctttatgatgggtagtaactggaaatctgcatccttccagactctagctactttatttgacaaacacctacatgtctcctttatgcttaaacagatcagtgactagtcatgaatttactgtatatgtgtcaacgttggtctcattctttgtgaaactctctttccaggaatttttttcctttaatttcccagctaatataccagccccaaagtctgtgtctgacctcatgcctctgcaccacagagattagagagtacgctccaacaaaaccctgaaagcatgccaatctcacctggagcaattcctatcttacaggagccacccttttccagattcttcttatttcagatccatatataattacagcatttaaaaaatactgtatacaagtattatagttgttatctgtgggagatttgtcttatacaaatttctctcacattattccaagctggaacatcaaatttgttttcaattttgcagattttctaaaattaaaatttacactaactctaactacttaagatagaagtagaattgctctggttaaataaagaaatagaggtagaatcctgtcctttttccggacaaacacatatgtcacaaaattacccagatatactccataataattctaggttttcatagatagtttcaaaataatttatctatatcacataatgagtacttatgaggggaaacatataccattcagaatatattcacatacgtgaccagaaaaattgaccatcggtttatcacaatcttcaagccaaactccaaaggacatctaaaaaatgcacattactttaaatatatttaaggctgctttacaatatattaaatatattgtataattagctaagtgcggcatatataattattgtcattttagtactgcaactactttatcattccacaataagaactgaaaacgtataattttatgactatatgtgacagacactatgttaagagttctgaaaatgttatctgactttatttttactaaaagcttttgacataagggttattagtctgattatacaaaagtgaaagctgagctataaagatatcttactacttacccaaagagaggcaaatagtaaaaatatgatccacaaatcaaacctcacttcgtatgcctgtgaaaacacattctttgaaacatatcatctttcatttcccaaacaaggaaagtgtttctcaaagaattaaatattttgacaagatttacattcattataatatagagattgggcttaaaaccagttcttttaattgttgggcttagccattttgtgctatatagcatgacagaaaaaaaaggaggagagagaccatattaggacatgtagggctattgctgcaactctgaaatttgagtagtttaaccacataaaaatgtatttctcggccaggcgcggtggctcacgcctgtaatcccagcactttgggaggccgaggcggtcagatccacgaggtcaggagatggagaccatcctggctaacacagtgaaaacccgtctctactaaaaataaaaaaaaattagccgggcgtggtggcgggcgcctgtagtcccagctaccagggaggctgaggcaggagaatggcgtgaacccggaggcagagcttgcagtgagccgagatcgcgccactgcactccagcctgggcgacagagcaagacgccgtctcaaacaaacaaacaaacaatatatatatatatataaaatatattgttttgtattatatatatataaataaatatataatatatatatttctcatttacacaaaatccaatgtgaattagtagctttctttgactttgggttttaatttaagcaaaagataccattatggtttgactgtaatggtgacagtaaagctgagtcttcaaggaagtaagtgtaagctgtgcatgtcatgtgaaagagcatcctgggaaaggtacaggaagttcagaggtccagtgtgagatgatttttggctaattgacgagcgtctgggacgccagtgctcttggtacagagggagaaaattgtagaagttgaggctggggatgtaaagtctgtaggtctttgaaagccattgactttattctaaataagatggaattcctcttcttcggtcttccacgccaggctctaatacctaattatcaaaacttaaataatgtgtcttctaattatgtatacatctttcctctctgtctttgtcagcagactctgtgcatatttgttagcatatgtacaacaaacctcttttgtgtttggtacctgacagagaagtcatactggctgcgtgtttcttgatcagattttatgttccacttcaggttcatgggtgtccctgtgggaatatggtcctctttacatgcttagaatcaagccattgggttttcattgtcatattatcttggaaccaaatcaatttggccctctataagtaaactccactacgaagtgcataggtttgtcctttaaccaaatctggagatttggacactttatccaagtcaattggtttttccacttagccttccccttatattaatccagccttctgttttgactcctgtgctctactactcaacctcctgttcagactcctggagtccttgtccctctagttctactctgtctcaactcacaaaactgacatcagccataattattaagtaaaggtaatatgtgatcctctgacatcctggagaatgcaaatgaattgatatttctcctaactctgcaatgaagagtcagacttgaaacgctagtactgtcatgtgatttattactataaaaatattcaatgaaaaatgtgcatctttttccaaacttgtcatttgggattggcaattcaaaaaacaataataatgcttggagaatcaaaattatctacctcattctctcaaaatatgagttacccaggtaatcaaagtgacaatgatgaaatagatataggttaagtaaattagaaagaggacgttatggataattactataaaactaacagattaaaaattaacagactaagattataactaatcaatttgttttagtttataagtaaaacatgagttttgatatatacttgaaacatttaatactagtgaatagtaatattagttaattaatgaggcaaaaataataccacatttgttctgtacaactaaacttttaaaatccattttaaaagcatcttctatgaataagctttagtaaaaagaacaacaaattgctaccaaatacattatagagagtattaatggtgcatttgatttctgcacacatagactgttgaatagctttcaagtgaaagtccataaagaaatacatatcaatacaaataaactaacacttattttattatagtgagttgcatattttttccaagctagggtcaatagaaaggtaactctatttcagtgaaaagctagtttttcctaaaataatgtttcattatttatacctatatgtacatatttttttctaagtctgtgtctctgtaataactgcactggttcaggaaatgaccaaagttttcctaagttgaattgtagaaatatttttcaatcatgtgatgcttttttcaaagtttgatttttgctttccctatatattggttcctgaaattgatagtttatagtttatgatagaagaactgaagatatattttccacttctcgatctgcctatccagaaatgcatctaggttttcttccaggtgattaaactgtaatctcttaacaattcactccttgaatttttaaatacacttctctctgttccctccgtgaaagagcatttgttgccgagcaaaaaggtgatcttcagactttccagaccagcagcacccagagatacatgtattcctttttgtccctaaaaaatttcatggattaggtgggcatttagaatattagtggaaaaaagcatactccagaaacttaagtttcatttttatttttttctgtatcattatgcctaagaatgcacctgcctcaatgcatgctgctagtctttcttctaatccttcctttcataattatcactctttatttagaaaagaaatccatatcttttacccactgtgaaatagaaacttcactgtttctttactcttgagtaaaaagtctgaagtgtgccaagcaaaggaacaattcaaaacactgatgtttgtgaggactcttttattcaaaacatcacaaatccatggtaggactgattttgcatttttacacacataggcacacactcatatacaccctattaaagtggaaaagtggcattacaaatggtatattctgacctattccacaatatctgaattaaaacttattatgtaagaaattctgggagtgatatcaattcctctttcattcctgtgttaatcaacgcactcattgttcctgagaaagagaaccatggggaattaaaattgtctatagaaattttagatgatgtattatttatgtaatgattctgtagacattaaattaataatgcaaacttgaccgcataactccattctcagcagtattgataatgacaaatagtctgctcaattctgttattcatgtataccacagacatatgggatcccacatttttcatgaccttaagaaagatgtaaattcgtccttttaatttttttaatattcatttagaatcagaagagaatcatctctttcctaagctccagtattatcattttggccaatctaccaacttcccttatctggatcccttatctgcaatcacctcttcattttttttctacttgtacaccaggtccactattttctatttgcaaaaagagcagccagaatgatctctgtgaaacaaatttcgttattccacttttctgcttcaaacacccatagtaaatctcaaggccgtaccataccaaggggctggcccccattacctccttgacagtccccttaactaccttccttatctgtttattcccattaaggcacatcatgccagaatatgttcacctcagaatgtttgcaaggctttatttaaaccttttcattatgggtggtgggatgacaatatttagttaagcaaatcaagtgcttatgtttttatctcagaactataacagcggtgctggtttaaaaaatttgtaaacaaaaagtaagatagggcagggggagatcatttagggtattattgcaaatataggagtaaatttatatgaactaaagcgaaaataattgtaacagaggatcatagactttgatgcatttagaaagtatctgaccagctctgtaaggggaatatgaaaaaaaaaattggcatgatttagaagtttgtttgagcaactggatgaattatcatgacaacaaatgatattgaggataaataccaaagagattaaaagagtagagctaatctttctgtatatctctgcacttcaacagactgtctggcttgagaaattacaggcagctcatggggctgaagatagacaaatatacattcctggagggtcattttctctgtctgtaaatgagtttggtagctggctcagtaggttcaaggcagcataattactttttttttttttagatgaagcttgcttctggtctctggaggcttcccgtatctaacaagaccagtagtcttattggtatgaagctgcatagatgtttccaatacccccagccttataaatactttgattattatgaaggtgaaaaccatgctctaacaaaatattggccatggtgaaatcagaccacccataactggttcaagctgcgggacaatgtcactcaagaagattgttgtcactctactagttcccttaatttaaactaagttctccataaaccttcatcttttgtgtgtctctcctacttttttgcacatgtcttcaacttttctttgcacatggtgaatttcagtcttttttctgcgccaaggtttccagtttttatgtggtgttcactctcccttattttgattgcagtgattaaaaagaaatcttgagatttagataagctgactttacattttcaaatggggaaactgaatggtctttgagatttcataaagagatttccaggtaaaatatacataaatattatagctcagaaaactagggtattctgtgtattattctgattctctagggagacaaatttaagagaagaaggcccctagttacccatttcagctctatagattactagctttcaacaatgagttctcacctgtaaaacagatacactgatggcatctttgcacaggaggattattatatagataactgatataatttatgtaatgtgcatgtatattccctagcattcaaaaatgttaccttgtagtgttgttattgtcattattattattctctgttctagactttgaatgtgttgaagtcctaggctttaagtaatcatagctgtatttccaatggctaatacaatgagtggcaaatactagctattcaatatctatttctttaaagaactaaccacacaggttaaggtcataagttgactttctctttattcacttctaagactgaagaaaactgatagccagagaaaatttcaattgaatttgaagcaatgctgtcttgaatatgcagtaatacttaccaaagtgttagggaaattgtgccatgttcccatatttacaccttcttctcttaacaagaccaagtcaaaaactaaatgttctctctctttttgtgtttgtttcatcattttctttccttgaattatcttccatgctatattttggtgcatctgattggaaagttataaaatttattttttagcatctgatttgagagttaatgacctcttatattttgtgtcctccataaatattatgagaaatcatggtatacagagctaaatacaaatacatcatttagaaaatattttgcatttttgttgtttttaactttatcttaattcatgagaaaataattttaatataagtattttggcctagtcaacatatagtttttaccattaaacaattatattgaaattcttcaataagaactgtattctgtgtatataacatttatgttagaaatattaatttattaaccatgcataaaaatttatattttcttatatcattaattttatgtaatatatgtgtgctcattcccagtcccccaaattatagaaataatatttacagtgtagcaggattttaaacctagaatattacatattaaaatttataaatattcaaaaatacatttttaattacagatggctacataattatgaacaatataatacccagttatttatgaacttttcttttctcaggctaattatttgttcatttcattgtttttgctactcagggccaatgacattagagtaagttgttgtctgtatctggcgatctctcatttataaaaatgctcttccaacttttgattgctctagataaaatctaaatggtaagtaatgaaagttcctactatatagttcttactatgtaattctattccaattatagagttaaatatacagaaatacacatgaaatgcaaaataaatgcacataaaatgtagaggattaaaaataataaaaagttacaatgtcctactcagtcttttaaattttaattaggtacctaggatatttccataattccattgtgttcacccttttaagattccaaaaattttttataaatcagaatatttttattgcttacaattttgataattgcacctatactattgattttgaaagtttgggggtgaaggaagaaaatatatggaaaatatgcatattactttgactttatgtgaattctagcaggaatcaatccaaactgtcagccaaattagaagcggttcaaattaaccaggcatttcccactatttccagaatgaatttaaaaagtccaaatacatccataaagactgatacactgaaaccatcacacacatggttttatcagagcatattctctttcctaactaaaaataacctccttctgagaataaaaatctgaaaagaaattccattcttgattatctgcaaaagctacaaaagctcttatgggcctattcaaccatcagattggcagaattttagggaagtccattcctgaaatgtatctttatttcctgatgtgcttattgccaatgttattttaactgttagagcatcttaaagacataaaagcagttggctagatattctaaagacgatggcagtagcccgcagcttacataaaccctatagggtccgtgaacatagttgcaataaagcagaacattgaaaacacagcttatataaaacttaatacactcagcccggaagatacttttaaacatttgctaaaattactttacaagcaggcatgttcactataaaatcatggtaatggagaaataaagcaggggtatagaataaaaagcaagaaatttgcccaaacagttcatttaagcagctaaagaaccactagggttatcttgatacaattcagagtttctttacatgaagatctcatttacagctatgtggtgtagataattatcttatttaaggttgttaccaaagctttcatgtttttttaatatcctaaatgagtctctgacctttcaggtatgtgtgcttgtgagtgtgtgtttttgctatattttaagtaacatttgtttacaggctacacttacaattacatatgcatgtgctcgttagtagttaactttatataagacagaaggcttattattgactgcctattattgttcagaggggagaataggtagtattaggagaggaaatgttttcaaagctaattaataggaatttgtggttagtgaattcctacaagatggcaaacctagatttgcttggaactaaactgcatggtattctttcactaaattgctgctttcccatcattttttaataaaataaggacaactggagggaacagtagctcaacagaaatgtgagcacatatggcctagccagtggaatgtcttagtcacacgattatctccggggacaatgacaggatgaagggccagtgaattctactaaacctgttcttatgtcttcctcaatgaagcctattctctactgcatttagtataatattgtagaatttacactgaagctgttacttgacaattagtgaccatggaaagtcccagcttgttcagtaagctgaaaatacaaaaatgaatatctatctatatatataatttttaaacaagagtatgttttactatcccacataaatggttaatcatattctttcctatggaaatgctgttcgttgtgtctgaaaatactcgtaataaaaatcatagcatgcatacttggccttccacttcctattagcatgtaggaagtgtaaccaagtcccaattcagtctgctcaccgcacgacagccaataagtcaagagagaatgatttggagcaaagaaaatgactttatttctgaaagccagcaaaccgaaaagatggcagactaatgtcctaaagaaccatctttagtcagtacaaatttcaagctcttttttatgttcagggtagggggaagagaaagggattgagaccaaagagtgattgatgaccacagtcatctgggtgccagtgggggtctgaggaggctgtgaaacctctctgtccttggtcaggtcacaacgcctctgcaaatccttaccacaacattgctacttgtatgtttacctctgttatttcctctgggattagttttgggaagtgactattatgattcttgctttaaagttaaattataaactaacttcctcccattgttagcctggcgtacctgcagagataagcaaaagcaattaacctaaaagatatcaccatggacagggaccattaggagcaaaatggagttagtcatgctaggcctcctttttcactgttacaaaagcaacaagggaacattacatcctctctaacaaaaataagctcggttgtctaggcgttttttaaaaagtctaccagatgactgagattgcaaggccctctagtgaaatgaaattcttcagagtgagagtaatgagtctatgaaatagggtggagagacaggacaaatgaactgtcttacttaaggcagttctgcaggaagaagagatgttcatggtaaaagcaggttaaaaaacagtggaaatgttaaccaattcttaaagatgtaggctagcatcatgtttagaatcccaggaagcctctaaaacaagggaagtctggaagtattacacaactcattaccatagtcctctgacaagcattcacaaggaagttttgtggtaggggaagaagcctgagaggaaaacccctccataatgcaggcatgcagggattcccagggcagaggagctgaacctagagaaaactctctgtccactgtagaataagttcatggtcatggctgactgccacagggatataatatcaagcactgctctgatacaaggtacagagcactgctgaaggagggacaggaaacctgttcacatcaaagattctgcactgacttaaggcagaacacctctgccttggtgggggagaggcaggaaacgcctagccataggctttgcactgagttgagtaggaggaaaagagtgacttccctacaaggaggctccaaacagctgagaaagttccacacacaagtttggggatgcaagtgctgcctaagatgaaggctagacaaggagaattgaacaactcccctacccaaattatgagcctgccacaggaaacacagacacacacacacacacacacacacacacacacacacacacgaaaaaactacagaacattatctctcatgtagacagaaatctataaaatgatattagcaaatgtaatccaacaatatttaaaagaataatattccattatcaagttagcattatccaggcatgcatgattggtttatgtatgataattaatgtaattaatcacatcaacagattaagtgtaaaataatttgattcttaaaataggtgcagagagaggctgggcgcggtggcacatgcctgtaatcccagcactttggaaggttgaggtgggtggatcacatgaggtcaggactttgagaccagactggctaacttggtgaaatcccatctctactaaaaatataaaaattatccgaggatggtggcacatacctgtaatcccagctacttgggaggctgaggagggagaattgcctgaacactggaggcagaggctgcagcagagattgtgccactgtactccagcctgggcgatagagcaagactccatctcaaaaaataataataatagatgcagagaaatcatttgagaaatacagtgaccatcttatttttaaaatctcaaaatactggaaaatggggggaggtgagagaaacaaaaaattcttaatttttaatgggtatttacaaaaaagctatgaagcatcattttttttttcatggatcaatataagggacaagacaaatatgacctttctcactagtttctcatacaccattgtactggaaatgttgggcagtgtaataagacaagagcaaaatataaaccatattgattttaactgaaaagtcaatctctctcggcaaatatcttaattgtacacagaaaatcctaaaacaaatctctaagagaaaacatcttggcagtattttatgaaacttaatatgcaattgtcatatgacccagtaattacactcaaggatattaatccatgacaaataaaacccgtgttcccacaaaaacctgtacagaaatgatcacttgcacgcacatgcatctttattcataatagtcaaaaactggaaaccacccagatgtcctttatttgataaatggcttaacaaactatggttcatctatgccagggaatattattcaccaataaaaatgagccaactgttgatacagaaaacttggctttgatctccagggaactatactaggtagaaaaaccaatcccaaaaggttatataatatgtaattccatatatatgtataacattcttgaaatgacaaaatcatataagaactgattagggggtgacagattaatgaggaatgggaaggaagagtgattttaatggaattgttctctatcttgattgcattagggtcaataccctgactctgatatggcatgaaaattttgcaagatgttactattagggaaaactaggtaagggtaaaagatgtctttggtatttattcttacaagtgcgtgaatctacaattatctcgaaatacacttacgcctcaattatctggaactaaacatttcaaaataatgaatgcacataatttcaaaattttctagaaattattatcacttttttcaagcttttaagtgtgctcattctctagatgtcatgttttctttctttttttttttaatgtttttttttttattatactctaagttttagggtacatgtgcacattgtgcaggttagttacatatgtatacatgtgccatgctggtgtgctgcacccactaacgtgtcatctagcattaggtatatctcccaatgctatccctcccccctcccccgaccccaccacagtccccagagtgtgatattccccttcctgtgtccatgtgatctcattgttcaattcccacctatgagtgagaatatgcggtgtttggttttttgttcttgcgatagtttactgagaatgatggtttccaatttcatccatgtccctacaaaggacatgaactcatcattttatatggctgcatagtattccatggtgtatatgtgccacattttcttaatccagtctatcattgttggacatttgggttggttccaagtctttgctattgtgaatagtgccgcaataaacatacgtgtgcatgtgtctttatagcagcatgatttatagtcctttgggtatatacctagtaatgggatggctggatcaaatggtatttctagttctagatccctgaggaatcgccacactgacttccacaatggttgaactagtttacagtcccaccaacagtgtaaaagtgttcctatttctccacatcctctccagcacctgttgtttcctgactttttaatgattgccattctaactggtgtgagatgatatctcatagtggttttgatttgcatttctctgatggccagtgatgatgagcatttcttcatgtgttttttggccgcataaatgtcttcttttgagaagtgtctgttcatgtccttcgcccactttttgatggggttgtttgtttttttcttgtaaatttgtttgagttcattgtagattctggatattagccctttgtcagatgagtaggttgcgaaaattttctcccatgttgtaggttgcctgttcactctgatggtagtttcttttgctgtgcagaagctctttagtttaattagatcccatttgttaattttggcttttgttgccattgcttttggtgttttggacatgaagtccttgcccacgcctatgtcctgaatggtaatgcctaggttttcttctagggtttttatggttttaggtctaacgtttaaatctttaatccatcttgaattgatttttgtataaggtgtaaggaagggatccagtttcagctttctacatatggctagccagttttcccagcaccatttgttaaatagggaatcctttccccattgcttgtttttctcaggtttgtcaaagatcagatagttgtagatatgcggcattatttctgggggctctgttctgttccattgatctatatctctgttttggtaccagtaccatgctgttttggttactgtagccttgtagtatagtttgaagtcaggtagtgtgatgcctccagctttgttcttttggcttaggaaaagaggaagtcaaattgtccctgtttgcagacgacatgattgtttatctagaaaaccccatcgtctcagcccaaaatctccttaagctgataagcaacttcagcaaagtctcaggatacaaaatcaatgtacaaaaatcacaagcattcttatacaccaacaacagacaaacagagagccaaatcatgagtgaactcccattcacaattgcttcaaagagaataaaatacctaggaatccaacttacaagggatgtgaaggacctcttcaaggagaactacaaaccactgctcaaggaaataaaagaggacacaaacaaatggaagaacattccatgctcatgggtaggaagaatcaatatcgtgaaaatggccatactgcccaaggtaatttacagattcaatgccatccccatcaagctaccaatgactgtcttcacagaattggaaaaaactactttaaagttcatatggaaccaaaaaagagcccgcatcgccaagtcaatcctaagccaaaagaacaaagctggaggcatcacactacctgacgtcatgttttctttctaaatgatggtcactattgtggtttatcctatcatattttgtactcctataatatatagattctgttgctcctatcatttaattaaatgcagaaagtttaggtcagattgatgtgtttatgtgattatccttgtaagatcaattgcattctcatatctatttcaatagtatttccaaattaaatgcaatattttgaaagagatattgcatttttatttttattaatttatttagcatattctcaatttaaattctcaattaaatgtgacaagttgacaagtcatcaacttctccaaatgtacatttgtgtgttatctagatctgtgagtatcctgctcccaaatttcagatatttcaatgtgtgcatttctttaatttttgctgactttttatttaacatttgctcacattaaggttcattcaaagtctttttggcataaattttgaataggggccttgagctgttgggaataaagaacaaccactaaaattgggcagaataaccacgttttcattaaatcagtttgtgtaaataattcagttatctagaactgagtgtgcttctagtttacatcatcaaataaaaaaaaaaattcccctcttctgtccgggtgttcttgtttaactcccacttataagcgaaagcatgtggtatttggttggctgctcctgggttagtttgcttaggttaatggcctccagctctatccatgttgctgcaaaggacatgatctcattctctttatggctgcatatttcatgtatatctgtaccacattttctatatccagtctaccactgatgtacatttaggttgattctatgtctttgctattgtgaatagtgctacaatgaacatttgcatgaacgtgtccttatggtagaatgatttatattcctttgggtacatacccaataatgggattgcagacaccggggcctacttgatggtagagggtgggaagagggtgaggatcaaaaaaccaccctttgggtaccatgcgtattacctaggttacaaaataacctgcacaccaaactccatgacatgcagttgacctatataacaaacctgcacatgtacctctgaacctaaaataaaagttaaaaaaaagttggataaccttcttttggtaatataatgaagaaagtattccttgtttcaaaaatcacttatttgaagacaatttgtctatgatttgcaatgttaaaacatagtgcatcaatatatataataaaattgactctgttaacagcctacaaattcattaaatttataaaaacggttgaagtttagtgaatgagagtaggttttaatttcaataactttaataactctctgtattatacatacacatatatatgcatacacatataatttatgtactgaaaatattagtcaaactattttgaaaatagggaagataatactttagagaattcttccctgactctttcctaaagcagtttttttctacatgtacttgaagctaacttgtagtggatttggtatgaaaaattacatcttaaatcttttcaggattttctctaatctcataaacttggaaatataattggataatcttcaatattctgtaataccacccttgttttgaaaaagaaagcatatttattatataccaggtcttcctgtattcccgactgaatgacaaaaaaaaagattaaaaaatctaagtaatacttaattgctttaggaatatatatcccatcatattttagcaccattggtaggtgctaaaacaataaataaataaataaataaataaacaaataaaaaataaataaaagtaaattttaaaaaatgttcccctcttgtgtccgggtgttcttgttgtttaactcccacttataaatgaaagcatgtggtatttgaaaaagaggattctggattctcattgtgtctccttttcttaaatgctttgtaaattttggaaagttgcttaaaagctataaactaatgataagttttgtgtcaccatagtaacagtgatggaaggtcatactgtgatgaattacctatcacagttggtgggaagagatgctggaggtgaacagacatgttagtttcttactttgcttcatttgtcacatagatattcagacatttctggaaataaacttgccaagttttctggtctatatacatatcacataggagaaaaaaatttgaataaacattttttagtcagatattctactgaaactcttttctgcttatctatttccatatgaatatactatatatgcgttataggatatgagatagtctttaaagtttttctccttcaggataatgaaatgtgagcagacataaagtgtatcacttctgggaagaaattttaatattcaacattgtgttaatcacttttcatttcttccaacatggagactgatagatcccaaatcgtggatctctggctgcctgcgttcctgaatgcagctggcaagaagcaaatagagtgccaaaattgtgaataaaaatgtagcaccgaaaaaaatctttcttgttccagccactgagatttggagattatttgctactggagcattatctgggttatctcggtagcttctatgtaagattccatgctaggctacatagagaagtcaaagaatattatgaccttggccttattttcaattagtgctatgcttctctcttagggtaaaatgctaacaaatctttcattttatatttataaaataattttccttcatacttctttaaacatttataggccctaactacttgtactgactagttagatatgctctttagaaatcaaaaaaaaaaaattttaaatcacatgactcgtgatcttatacttttgaggataaatgaaatatacaccaattctatcactaatgaatttcaaacagtgaggggaaaaaataaacactgatagttctaggaagtccaatctatcccttacatatttatgagttttcatgcacttactagtatcttgctagtaaggtttctgtatcactgtatttagaaaaaattagacacttgaccctttgggcttcagattaccacaattgccattacagactgttagccaatatagcagccatagtagttaagagataaatcacaacagctatttccaatttcactctgtcatatagagagcttggaggttcttactctcatccttaagaccaaaaaaaataaagtaggcaagctaaaaaccaacaacttttctttcattcgtcagtggccttcagttgtagcataaaccactactctgcaatctggagagacaggcaaccaagcactgcctaactgcaggaaaaaccactgggggcatgaactgggagaagtatttaaatagaaatgttgatgattttctgtagcctgagtgtggattacaatgagaggtgaagctggctggacttctgggtaggtagggacttggagaacttttatgtctagctaaaggattctaaacacaccaatcagcgctctgtgtctagctaaaggtttgtaaaggcaccaatcagtactctgtaaaaatgcaccaatcagcgctctgtgtctagctaaaggtttgtaaacgcaccaattagcactctgtaaaaacggaacactcagcactctgtaaaatggaccaatcagcaggatgtggatggggccaaataagggaataaaagctggccaccccagtcagcagagtcaacccgcttgggtccccttccacactgtggaagcattgttctttcgctcttcacagtaaatcttgctactgctcactctttgggtgcacactacctttaagagccgtaacagtgcgaatgtctgcagcttcactcttgaaatcagcaagaccatgaacccaccggaaggaagaaactccggacacatctgaacatctgaaagaacaaaccccagacacaccatctttaagaactgtaacactcaccgcgagggtccacagcttcattcttgaagtcagcgagaccaagaacccactggaaggaaccaattccagacacaacaaggcttatcagagtgcaagaaaaatcatggtatgaagatacaaaggaagcaccagaatcagactcgaatatggtacagaagttggagttattagacagagaatttaaaatcactatgattgatgttaagggtgaacatgaaaagttggaccactgataagaaaagattattaattgaagcagatacctgaaaacattaacaaagaataaacaggaaatgctagaagtttaaaaaatatactgcaagtccaaaattccttcaactgtttcatcaatagacctaacaaaccaaggaaaaaattagtgagcttgagtataagtcattagaaactttacaaactgaaatgtgatgataataaaagataaaaaaggaccattcaaaaactgtaagacaatatcaaaagatgtaagtatatgcataatttaaatatcagaagaagagaggatggagaaaacatatttgaagtaataatggccaagaactttgcaaaattaatgacagacagtaaaccacatattcatgaatctcagaaaacaccaaaaccttggcagctgtagtgagtagaaagtcccatctcaatgttgccttaaccttcatgacagcgagtactgctacaattctagtgatcctttaaggaagagccattccactccccaaggatgtagtaagggaaagcctcgtgctaaactggtgagagtttctaagtttataattttttggtttactcaaatatcttctttctcatgttacaaatatgttaccaggtgaactggttagggtaattaaccagttttaaataaaatttatgggaggccatttttttgaactaggccctaacagatgaaactaaaccagaagaaagtcatttgtgctaggtgccacgtaatcaaactgagctttaaaacagaccagttttccaaaaaacaggagattcatagcaactgatctaaaggggcccagttaacttgagccagcatgagaaagaagttccgcctgccttaactctataggaaaataactttaaaatggccaattcacttttcgttacttatttctgttttcttcagctcttttctgcctacaaagtcagctcagctcaatgaaactcctttctatttcatagatgggatgatgcccaaatcgtgaatcactaataaaagccaattagatctttaaacacaatttgttgcaattttggtttttgacaccagttagggtcactacctcacaaacttggaaaacatattatactttatctactcagtgatcagggcatgtcacttatccatttatttcttccttagtgagcagtggtgttcatccattctctcacagaaggtttctggctcctgcttagtcagggggaggcttcacttagcagcctcctgcctcatcaccaccatcacccatccacagaaaacacacaaacccgccacacttgccatagactttttattaaattattttaaggttcaacaataggaagatgagcattttatgtaaccattactgcacaagggtgctcctccagataaatttaacttaagcttttaaagataagcagctgggaactaattttgcatttatgagaaaaaagaaataaaaagacatgcctcattaggccaccaaaaatcttgactaagtcacagtccattgatttggtctcctcaaaacaaacaagcaagcaaaacaaaagcacttgtcaatcagttttagctcctttatgtaaaacgaaaggaattacatattttaagaaatcaaaaagcctttagtgttgctgatgttacttataaaattatctttcaagatttacaaaagctttcatcgtaaaaaatctttttcaaaatagactttggctccctaaccattatagtaatagtaaggaaacactcaagtttttaaacatgtcaaaacacgacatttatggtagcctttatataacactgtttgtgtgagtcaagatcttgttaagcatttctcagtttattctctagggtgtactggccaaactctaatctcatggaaaggtaaatataactgaagtatttggagagttgagggaaaatctcttccctgaaggagcattttgtgtgtttttagtcataaatgccgaaggatagggccataagttcttgtctcagtttcttaaaagtgttctgaatttgaattccattctttttattttctatccagctctggaatgagagagatggctagtgacctgaccttccagtatttgttttttgaacgtagctgtaactactctgattagtaacatgatatatagtaagctatatatagctctcattatagtgacttgcgggtatctcctaattttttaagttcttatcctttattatgttggtgccacatttgtccatgcttaaggagttcctaactgaaacgtacttccaggtacggtagccgtcatgtggcagattctcctcagattgttttctggtatttcctggtatgccaggtagacttttactttcagatcttggacaaaattggcaaatcatacttttcaacatcatgccccaagaaatgttatctgctatatggccaagatataccattgatagactccagtatcatattcctaggttagttaattccgtatatattttctaagcatctatagtagctgttagcactttagtcttagggttacaaaagtaattaatatgatccactaggctcaggagttacaaacggatacattaattgataaacagaaagtcaggaaattgctactacaggacaccaatatttggactccatcaaatagtggatacatacatcactttgtaaagataccagaaggaatgtggagaatactcaaacactgtcttacttctcactcatggaaggtgagttcttaattttcgagtgtctgacatgagttcttaatttcccattaattaaatggtgattatatttaggtaatgtggttaatggaatacgatggtttctcagaagcgtactaattcatggctccataaataagcactcacatcaaaacacacccgtatactgtactcataaattctaaaacagtgaagaactaatttaaaaaataaccaacccagatgcacaaatattaccttaaaagcagattaccatagatcacaggtgaccacccctgcctccattagagcaagagctatctagaattaattccatcagaatccctattaatagattgctctgccatgcaatctattatatataatttgagactgctctgcaatctaatatatatatttctgttaaaccagcttattaactcaagaaatgttacatgtatttacttttcctctcccatattctcatcttcttgactgctttgttcttctgcttccataaaccagtcttcccttccttctaaaagctacgccctggatacttttatatttaattaaatgtttgcaaattcttgccttaagtataatgttactttctcctgaggtcacagctcccattacagcttattaaaatgcaaactataaaataacccatatgcagcatgagagaaggcatcattgttatatttgattttccttctttctaaggattaaaaaaatctgtcgtatcttctgaggctcatatttcttgctttacccatgtctatctacttttcctaatctcttttaactgtcaagatgcttaaaagtgagatcaatctcgattcattctcaatgcccactaaaacagctctcaattttccaactatttatgaacaaatttgtctgcaaaaacactacgtgagcacacaacatttcatgaatcaaatctggacaaatatgcaaaacaccctttaaacactaccaagtacttgagtttaccacctgtcttatgaaacatattttccatgtttggcatataactttccatcaaattgcatataaccttccacccaccatttcacagtaaatcaaaagctgcaaccatttcaatgtccacttctacaaggaaacttcaggtcttttctgagataatgtgacatatttcttgtagtgttgatgcctttcttaccatttgacatatgtaatcctgtgctactgtctttattattatttttaaatatgtccctaacaaagctttggagtgttgtgcccttacttccaactttttgtaagccctgtggcttctattatttgaatttacataatacaattacatagcgatttgtaagaaagcatgtactatattatagcagaaatgactatatctccactggcaaaattttctaaaaaatggagctactatactaagatgttttggagggaataagttatatgaccacatgtttccaacattcagtctcacattggaaatgtctgttaaattaaaatcatcgccttttcctctatgtcaactacctcttctgttctcagaggttaatttttcaatatttatctgtactttcaaatttcatctagaaaattgagtaaatttgagataataagctttagtggtagtcaaaacaagaaagcataccaggttttttttttttttagattagtggcaaatatgcaaacaaacaaacaaacaaacaaaaaaacatggaacttgactatggaagaggattcataacattaactagaaaaacctttaccattctggctttgaggatgggataaataattttaccattaatccatatatacaacataaaaagggaggttgctgtttgaaaaaaaattttttttttttttgagccaggttctcactctcttgcccaggctggagtgcagtggcgcgatctcagctcactccaacctccacctcctgggttcaagggattctcctgcctcagcctcctgagtagctaggattacaggcacctgccaccatgcctggctaattttctttatttttagtagagacggggtttcaccaccttggccagaatggtctgaaactcctgacctcatgatccacccgcctcaacctccctaagtgccgggattacaggcgtgagccacaacgcccggccgctttttgaaaattttgataaatatagttttattgagtttgaggggcatgtatattagcagacagaaaaatacggagattgaaagaagaactaagagaaaattagtttgttcacttgataattggctttagtattggagatgtataaacactgtgggaaagacataaaccaatgtggaggaaaactaaggaatcaagaaaaaaagtcaaatctacaaaggaacaaattctttcaacaatcataactgagtttaatccagataaatgattagatgggtaggatacgaggcactcccaccgactggaatgtggggcaacgaagaagcaggtacaattgcaggtggcagagagagtccaaagctgttctaggctgatacagtctctttttctaaatttaagtaatttctaattgatcaccttccagaagaagtgtctgctgtttccttccacaaacaaacaaacaaacagaacatagagctcttacttaatccctaattgcaaccttcagaagtcagtcaagcaacacatttgtacatgccggggagtcggggtggggtgtatgtgtgtgtataaattttcatccacagcctcacaattcctgaattggtgtgagaaacagtcatcacctggttaaaggaaaacaaaccacgaagagcaattttaaacaactgccaggatggccaatcatttttttcaatattttatttttataacgttaaaaaaaattcacaagcttctcaaagaatgaagatatgtagtgctacctcatggtcatgcctttattctttctctcctatacccataatccctatttctgtaatgtgagatatcaagtaaaatatttaggaagagtatgggatctccttacaatatctgcttataaagaaatagcactttattaccaatgtgaatcttggactgggatgtaattttttttgatggtcaacacttttgtgttcctgactaacatcatgttgtgaaaataattgtttcaatgattctagaaaatgtctacttttttatctcagcttgtgtaaaattaaagacaaactctttaaagctatacaatcatttatttaagcaaaatattttatagctatatatcatatgcttatttcttttggaaggaaataaaaatgaataattaattaacgtaacaaatgctgctaacacttatgaatagtattactacttcccgatgagaaagaattgtataagggtccctgtgtaatattttagctagtccaggccagaattgtccttctaagaaaacttacatttcccatctttgacataattataaaacttaccaaatgtttatttcttatggcaagcattttgggggagccaagaaagcaatttgctagacaatgatgacaaaataaagaaatagcaggctcctaagcaagagtgccaatgaacaaatgattttattatattttatttattatattttattatatttctctggttgaaattctagattaaggatacacagtgcctatgaaagacaaaattatatagctgagggcatgtgataaatacagttaaggactggattctactgacgaaaataatgtacaaagtaattgtgcattaggtttatttgattcactaattttttccactttactacctatgtgtgctgaaatgaaatcagatgagagaagtaaaatctaaactgatgaaaaatgcttttcatgctttaatactctacaaaatcataagtttctatcaagcttatgcataggttgtgacactttttttagcaaaaattttccacttgaatacaaagttaagaattacaatgccatgatctcacaagaagaaagtaaaaatgttggaaaaaggtagattccaatattaatcgagacttagagggtattctcaaaaatatttttaaatatatatatttaaaataacaaaaaagtaataatatacacaaatacttaaaatatgtatttaaaataaacagcatattaatttcactgaagtattatcgattgaaaaacctaaccagttacatttttagtttttacaacgatgttaatcattgtataaaaacagataaagacattcaagtattatatatatggcacattaggtgacaatttgaaagggttagatataaattaaatatttaaataacatatataattactacttttctctagtaatttaaataacaactggtatttattcagcacctacacatgtattactattattatggagtacaaaaaaagcataagatgtatttccaccaataaaagtacataaaacagttgaaaatagcagcattatatactgattcaggcatttagagacaagctgaatatatgaaaacatactagatgcatataattctttatttaaaaaaaattctagaacaatattgaaacagcctcattttctgaggtattacctggagttatttgagaataaggaatgtggacaccaagggtgaggtgggaacaaaggcttaataagctaaagagaaaatctctccacagtggacagaaggcctgaaagagggttgccagctgtgaagctgagtctggggtttttatggaccggaaggggaggaatgggctgaccggtctgtaggctatcttggagaaggcaccacttagaaagaggtataatagtgtaaagaaccaactggaagtagaagtgaaggcttggcctgggaccaattgaaggtagaagtgaaggcttggctgggaccaatcaggggctgaagtgatgatttactctgttaatgaagacttagcccacagccaattatagaaaggtaggcatacgtaaaataggtgaaaagtaaaagaccaataggtgaaaagtaagagactaagacatgccaaggggaaagaaatgtgtccaaaaaggggtggaatttgttcatctgggttcatagagtaagtgtttccattcaaggatgcagggtctttcttatctgggacctgaagtttgattatcaagctgttcttggtttgaaggagttataccaaggacctgtcctaactacctgcctgacaggtttcttcctcctctgtcagtatgagttatattgagtagtgatataatgagagtactagagctagggtcttgctgaaaatgatgtataataacagtagtgtgaaaataagatcaagtagagacaatgatattttgttatccacagactaattcctatgccatatcaccagttatgattaaacaaaagctgatttttaaaagtgaattaaataaaatagaaacttatatctctgaaatatatatgtgtatatatataagtgtgtatatatatatatatatatatatatatatatatatatatatatatatatatacctactgtatatatgtgtgaaatagtagcatttcatggttgatatgaaagggactatgggagtgtcattaggtcctaaggtcctagctactgttctaccatcctcagctcactgtttgcgttgcaagtcaccacatcatacaacaggtctgctggccctctaactttatctatgtactctaggctcaatgcatgagaactataagaaaggctgccccctcattttaggaaatgcttcttggaattgtaacacaatgtttcacttaaattctatgattaaaacttaataatataacctagaagaatataatatagaatataatataatatagaagaatataatataacccagaagaatataatatgacctagaagaatataatataacctagaagaataatataacctagaatacaacttcaatagaagttgggacatgtggtgttttagctgtgcatatttgataatattttattaataaatatagaagattctaatttatttgaacagataaaccctgaattagcaaatatggaaccatcactcccagggaaaatacagggttatgttcctgtgagcctctggccacattttcatcaacctattaatacataacttaggtttacgtgtgtttctgttttaagacaccatatttaatgtacatagttaattcattaacattgaactcacagagaagcttgctctttcttctgttacaggaatgcttctaatggactagtgtaaaagtatgaagaaatgtcctctagttaacagtttctgttgacacaaacatagcaacttttacaatgttaacctaattatgttgagaaaattaaactcaccctccacagtaatgacaaataagaaccaagattgaagaagcagattataggaaccatcttgggcattaaaaataaatctagaaaacagacaatagactgtggatttatgccgtttttctttggaaaggacagatgggattatgcaagaaacctagatataccagaggcgatttttccactgcaaggaatgccatattcagagactacataacaaaatcaaaacgttgaaatttagcggctgtccttgctgacacaaacacacacacacgcacacacacacacacacaatgcttcattcagtgggtttatacaaatcaattttctgcacaagaggggaaaattaattaatataaaattcctcaacacattattaaagtatataaatccctttaaggtgacaaagtcaattactgtatgtatatttgttcatttttattttctgttttaagaaccttagttcactaagagaaaccaaaagtaagcaaagaatactagcacaaattaaaccccatcggtttttcaggagaagatactgtgatccagaggtgtaagacttttctattcagattccagataaaggcatagaaaatctagaagttaggtgcaagcccactgctattatttttaagacttgacaaagtatgagggaaggttcccagttgtgaagcaaattcagtgtacactggttaccacttcagcccactgcatcttagactgcaatttctactgcttgcacaagtcctacgagacagaagagtcacacaagttacatgaagcatacttgttacttacaaatagggagcaagggacaacagaaaacaagaattcatgacaagctaatctgcaaagttcaggacagccacgcagggtagatagttttgtctgcatgtgtcgtaattgtatcgcagctgaggggccccagaaagcaggctgtcgtgggtttttatcccaggggcaaacttgaataactgagtaaaatattgtaggacaccttcttctaggctgggcaggaacaaggcccaggcttttctggctagtttcactctatctcagaatgttacattcccagcacattctgaagactacaagcaagaaaagagtgacaattgaatttgttcaagtccacccagaaaatggcttgcaccagttcacaatctgcccattccatgcttcttacacttgattccttttgatctttgactggtgtctggaccatgagtttagataataaaatccacatagccagactttatctacaacctttaaaaggcctacaccctccatcgtcatcctctttcataatttctttgcttaagggtgtgcacaaatgaggctctcaggaaaagaagacagagggccaaggagaaggtctggcccgttggatggggaattccaaggtccaagatcatattttggaagaggatgcaggctgcgtgcgggcatatcccctcagtgcgaatggctgcttggcagatgggtcaaggctggaatctctaaagccctaattcaagaatgaggtccctttgcttgggtcacaagatggggctgtctaactattttacttcatattcagtgtacatccggattccttataaccccattacccaaaattgttcacttgttttaaatttgcattctttcttcatttggaacaaagagatcaaaatcctaatttattatgtggactcactgctgcctacatttttctaagtaggtattttatcttttattaaatatttatctcatcttaatttttttagttatgataagatactacattgctcaataggtatgtaatgtgtccaacattaaaatggaaaatctatatttttaactctatgaaaattttaaactttgcaaaatcatacataaaagggttaaaagacaagatgaactgtaaaagtaagtgtaataaatacatcataaactcacgtatcttagatatagaggaatcataaataataataaaacaataaaaattaaaataaatgcatacaaactatatagagcacagaaacaatgagtagtaaacacacagaataatgtaaataaatgtctgaaaatgttgtgatgatccactcaactttactaatcataaaaaaaagaaagataaatagaaggaagaaagaggagagagaaaaagaagagagaagaaagaggagagagaaaaagaagaggggagaaaggaagaaaatattttcatacctttcaaactggtaaatttcttaaatataataatgcacaaggatagctgaaattggcattgatagattgacagaaatgttaattaatataatatttctggaaaacaaatcacaattagaaattagttaagacattccactcattacatgtctagaaatctaacctaagtaattaaatgtaacaaaaattataatatatggtcacagaaacccgaaaacaccctaaagattccacattagaagaatgatgcatcaaatgtgacatgtatgtaaaaccagggaatctctgaaacaatgcaaattttgagcaacatcatttgtttaaaaaatcctccaattaaaaaaatatttatgcacggggtacatgttcaggtttgttacataagtaaactgcatgtaacagggatttgttgtagatattatttcatcaaaaattgacaaatgggatctaattaaactacagagcttctgcccagcaaaagaaactatcaacagagttaacagacaacctatagaatgggagaaaatattcgcaaactatgcatccaaaaaaggtctaatagccagaatctataaagaacttaaacaaattaacaagctaaaaacaaacaaccccattaaaaagtgggcaaaggacatgaaaaaaacattttcaaaagaaaacatacataaagtcaacaagaattctccagatttatccaatcttggaaggaggttgatcttgtatcagacattttgggggaacattaaacatctaaattttaacttaaattttcataatatttagaaaagaggaggcaagttcaatgcttcctgtactccccttgcccagcttaaaactggagcccagtgcaggcacccagaacccccaaaccaaggtacaggcataaactaaatgactgtttttcaaaaatgtgatgcatgtgtgagttcatggttgttctcctgctgagatcattgctgtcagcgcctctgaagcttgccttgtctgggacctgccaggctccttatgaatttccttacacccctggtgttgggtctatccactcacagctattctctttgctgataccattttattcctgttgtcaattcacctgaaaagaattgttttaaaatacaacccctggcaggctctcttgagtaggtatttctggcatctttgcccttgcctaggaatgatagaaactagcttcatgatagctcttcttataaacatgcagaagacaaatgctattcatcaaggccatgagagaatggctgaaaaacatttcagagatgttcaaggctgtcatgcccaacaaagatgcagagtgttaaggccttgaggtcagaagggtttcaatggagaggtccaggttatcagtgggttgcaagtcacccatgggtcctggaggcttgctgcccagtgccacctcaagactctgctccccacattctagtgtagcattcttggtcacttcacctgaggctcaaagggacctaggtgaagtctaatgggcactttcctgtgggcacaagtggtaagcattggtgacatctacatggtgctaactctgcagctatgctgagtacaagagctgtgggaacaagcttcctccacctaaacttcaaaggaggccaaggggacccttggggtccaggcagggatccgctgtagaagcagggtcaccaccaagtccccatgggataatgcctagtagagccatggaggcaggaccactaccgtgagccataactgtagatccatcaatatgcaatggcatcctggaagagctacaggcacctgactccaacctgtgagagctgcagcatgggctgtgcccagcaaagccaggggagtagggtcccttggaaccttggggattcaacacccatcccagtgtgtctagaaggtggggcatgtaactaaagattgttctcaagccttaaaatttaatgtttgccctaatccattttggacacagttggatctgttatcgctttcttcttgcctgttctcatttggaatggaaatgtttatcttatgcctcttctaatattacatgttaggagcacataattggtttgctttctcaagctcatggctagagagaaattttttttccagatgaatcataccttgagtttcactcatatctaatatgtatgagactttagactttagacttttgagttgtggctggaatgagttaagacttctgggggctattgagatgggatgaatatattttgcatgtgagaatgacataaatttaggaggaccagtggcagaatgttgtggcttgaatgcgtcccttcctaaatgtatatgctgaaacttaatggctgatgaaatagtattaagaagtggaatttttaaacaattttaggtcataagggctcctcccttgagagtgggattaaggcacttagaaaagaggcttcacatagcattttgtcctcttttgcgcttctgctttctgccttgcgagactgtattaagaaagccctcacaagatactgctgcctccatttgggacttaccaacctccagaactgtaagaaataaatttctgggttttataccctacctaatctgtggtattttgttacagcagcacaaatgaactaagacacacctctttaagattttgggttctttatcacaatattttatttttcttggcctccagagcctcaactgaaaacaaaacaaaaattattctcattttgtcatcattttatatactatatgtttgtaattatagaacatcaatataaaattaggcatatagagagttgtatatgtaaacataattatgtagaaactgaatagcacaggagagtgtattttctggaactactattatccaaaccaagcagactgcagaccttcatcttctttctggaccagctgtcacccagtagactcagccacatattgtatccagagttgcaatatccattcaaattagtgatatttttaagacaaaaatccactaattctatgtttgtcaacttttatctatcaacatacaaaatacaactatattaccccaagaactttctaacacattattttcctcaccatgagttttactttactgtccctgtctcagcctgtagccctttccctgctctacatcctctaatacagagctccactactgcagaattctctgcattcacaacttttctcatcttcactagtaactgcactaattgaactctggttctctctctgggaaacatatattactgcttattccccaactccttttccttaaacactttgataccttgtttgcataattttcttcatacctagatgtcattgtcatcatccttagtgaatataaatgtccacatagacacagtaaacaactaaattatcagtttcataattgaaaatgtctggtgagcttttagcccctcacttggcaattcattttcctaattccaaatttgaccttttgattatctataataaaatctctttaatatgtttctaaatatcaccaattcagtgattctacaatctaatttattgcccagatacttggtcaaaaactcttgctcagaaattgaagcctctataaatttctccctatctacctctttttttcactttttcattatccagtttgctccatcatccatgatttcaaggacattcctgcaaatattctaactctcttgttcttctgttattcctatttatcctaccaagcaaaacagcaaccttggatgacctgaactataataacacagcatgcccttaccccagcagctcaccaatacaagataatttcacacatgaggtcatatcagcctcctaaaaatgcattatcatcactcacaagcctttgctactgcccatctacctcactcttcaaaaaaatatttgatcctctctcctctcctcagattttgattactacacctttctctcactccaacagatgtttttgccatctacctttcaaagaaaataaaagtcataagattagatcacaaatacattttagtactaaaatatatagacacgcatttgcacgctcatctcttctaaggttaattcccccttacctgtactttgaaattcacatatttttgctaaagcaaactatgttattgattttcccttatttatcttgcatattcaatctttaattctcaactaaaaaccctccactattttctattcttacattttaatcaaaatgataaaagtattggactgtaatttaactttccctatctatctatagcaaagagaagactcagagatgcaaatttgtatgatgaaaagtgcctaagtctttgaaacaaccagttaatcatagtctcttccttgccaccaatgagatggtgatgtgaacaagaaatacagtattttttgtcatttttaagcactgatactctaattgatctcttatagtgttataacaactagcattagtttcactgataccaaaactgttcccttgaagtgatattatgctgtaagaaaaagtaaaatatatggaattggttaagtagtcaggtggcaggtcaaatgatctgatatttatatttgtaacctgaaaatctatgccataaaacgacaagatacatacactattttctgcaagaattgggaattcaggcctcatgaaaattgtgcccttaactctaaaagagaaggatagaaaatacattgatattagtaatttggggtgttactacttacatacagtgaggcattagaagaaagaaatagacttagaaaaaaatgtctgaatatgcgacaaaaattacaaggaagaaagttcaaacatatggaggctcaaaggtggaaaagtgaacggcttctagactccaaagagtaacagataaaatagagaaaaagttggggcagcaaatgacataaggctcagcacttagatacttcagaagtggcctagaggttaacagacagtaaatattcttttttttttgagactgacgttcactcttgtcgtccaggctggagtgcaatggcgcgatcttggctcaccacaacctccacctcccgggttcaagtgattctactgcctcagcctcccgagttgctgggataacaggcatgcgccaccacacccggctaattttgtatttttagtagagacggggtttctccatgttggtcaggctggtctggaactcccgacctcaggtgacccgcccgtctcagcctcgcaaagtgctgggattacaggtgtgagccactgcgcccggctaaatattctatctgaggaaaaagtatgagtcacagaaaacctgggtaaggaatatcctgtaatttgatctaggtttacttaaagaaagaaattttcctgagagggaaagggccccaacaaaactgcccgttagaaacaacaaccacaccctcacacacaaaaaactgttaagtcctatcaaaatttgattttaagtgggagtttatgtgtagttgtcttgtttctattccaaaactgtgcgctgggtgtatcattacgtggagtgaagataatttgtatccttttagagaacagtttgctaaaccacagctagtcacatgtggacctgaaggagaaggtagaggatcaccaggaccttcagctgtcttaagtaactgaatgggtattggatttgtcgcccttggagaatgtgtgaatatgcccagtgtctgaaagaaggtgcaggatgaggtattcaatggtcaatggagtagcaaagaaagacaaccaaccaccataactgtttgctctctttctctaatgtatactagttgaagtgataggactaattttccagtaacttcatttttcagttttcagtctgtttgcagctaagcggggctgtgtgatttgtacttaacaatggagagtgagtataaatgaggcttaggaaaaaaaaggtgtgtctttttcttttctttttttttttcttttttttttttttttgacagagtcttgctctttcacctaggctggagtgcagtggtgcgatctcagctcactgcaacctccgcctcccgggttcaagccatttgcctgcctcagcctcgcgagtagctgggactacaggcgtgcgccaccacacccagctaattttgtactttttagtagagacaagatttctccatattggtcaggctggtcttgaactcccaacgtcaggtgatccacctgcctcggcctcccaaagtgctgggattacaggcatgagccaccgcgcctggccctcctggtccattttgaatgttaataactcctaagttataaatagacatctgaaatggaagaaactaagtgctttcttcactctttcatagaagtgcttccttttgtatccactagacatcacaccctgtcatcactggacagtaacatgagctactgaaattttgggatttatctcttacagcaactgttaccttaaaaaataattcagcttgtatatttttctatatttgaaaggataaaatggtactatggcagtggccaattcttgcctctccaccccatagctatcttgccagatgccatcactgaatgttcttttttattttatcctagaatttatatgcatattataaagctgcatgcttgcactaccacttaaaaataatttgttagctttctactattgttgtatgttttttgggtatgtcattatggatctgtgtaccaaacacttcatagaaagtcaataaataataaatacatatacttacgtataatatatttggtgtaatcattatatgtcatatattaatattatatgtaatatatttagtacatacattttaaatacaaaattatagataaataaccctcttatacttctcagccaaaagtatacatttgttcacacacacacaattagtttttctatgttctaatagaattacactggatgaataaataaatgtttgatatttgcattcttaagattatacaaacatggttcacaggacctcaaagtgtttcaataatgctttaatgtctcacttacaactaaagaaaaagtacacctttcagaaattaaggtttcctgtaaatctgcggtaatttcattgtggactcctttgaaatgacttctccattctgtgggtaaaattataatccttgtctccctctataatttccctggaaataaaaggttaatagttctttaagctttcctctaacctcagggacacccgataattttttgacttgcttaagccctccttgtattaccaactcaagaaatttttaggagcataaccgtacacaggaaagatgaaaagtatccagctaaaggctgcttttcagaccaaccactgtgtaagtcgatgtctataacaaagagtcaagagtcaagaaaaaatataagcagacatgaaaagagtggctgccatcttctgctatcaagttaatctgttagatgctttcttacttttattactttgttaatctttgtgttctttgtaaaagcctttaaaagctaaaaatgttgtggcatcatctatagcaccaaacacttgcatccatgtggtacagaaattgaccaatacatcttcacaaaagcagagacatttgtgaaaacgcagtattataggactgacaagatataaccagtgaagagtaatcaagtcagaactaattaaatagttaaaatatattatacatagaccaattcaaatttgattagtttcttttttatggaattgtacataatgactacacaagcaaaatgtaaataaaatatatcatgactatatttccttcattcacattttatccctctagactcatgataaagctatctatgaacacagcttgtacatgtcatgcaaaatagaacaataacaagaaagtattgccagttgtgaaaattttagcattataatattttgaatgtccttaatgtcttattgcatgcatgacttctaaatcagcatgttaaagtatttgaagtaaggatagtatatatgtgtatatgtatgtatacatgtatattttttctactgatatggcactgaaataatttactatattctctcttgatattcaatccaacttataagcagcacaaaatgttatattgtaaatgcatgtttattgagtatttcattatggatctgtgtaccaaacacttcatagaaagtcgataaataaaaagtacaagtatatttaacatatatttacatatgtttgatataatcattaggttatcttaatatattaatattatatgtaatatatttaagattattataaaaacatgtttgagtcattcaagtatgcattttgattatttacaacagtaataaaaatttaaatcacttcaatgatattaagaatattcacataaaaatatgaaatgaaaaccaattataataaaacagaaaataataactctttaacaaataccttataatttagagcaaatgacagaccaaaatatttctcaaacattttgataaagagatcatgagtctgattgaaaagatttttatgagaccttaataattacaataatttagaaaaagtaatcatgtattaattattacaataaacttccttttttaaagagctctaactgtggaatataaaagcttccaaatgtggaaaaataaaagtgtttcattgataacttattattcaagttttgcagaatgtgatattcttatattaactttgacttcttcaatatagtccccatccaaatttcccattcatatctattaacacctttactgtgtgaggtatgaggtgaaaaaaaaatttattaaagcaataatagaaaattcttgttcaatgtaatatagtctggtttagaaatattttaattattacagtaaaaaatttctaatagtgcagaaaacaagacttagcctttataatttagttttcacatgacttacattgtattataaattttatggctacataatgttatataaatgcctttattataaagaagacccaaaatatatatggtaaaaattttaataggccaattataaatcaatagataaattggtatttctaagcaatcttttgcgtacagagaatattaacgaaattttcactaaatcatctaacctagtctaaattgtgatgctcttgagttcataaatatagtataatcaaaggatattcattaatagcttttttaaaaccctatatcctgtcgggcgcggtggttcacgcctgtaatcccagcattttgggaggccgaggcaggcggatcacatgaggccaggagttcgagaccagcctggccaaaatggcaaaaccctgtctctactaaaagtacaaaaattagccgggtgtggtggtgggcacctgtaatcccagctactcagaaggctgagtcagaagaatcgcttgaacccgggaggcggaggttgcagtgagccaagttcgagccactgcactccagcctgagacacaagagcgagactctgtctaaaaacgaaagaaagaaagaaagagaaagaaagaaagaaagaaagaaagaaagaaagaaagaaagaaagaaagagaaagaaagaaagaaagaaagaaagaaagaaagaaagaaagaaagaaagaaagaaagaaagaaaaccctacatcctagtgaactacatcagatatgtgttatttatacctcatttgccttcatactcatctatatatacctccttttcctaccgtctctgtgcccttggagcctgaatctttggacaggatcagatgggcttattctctcacttttgcctagttgggctcagcaaatgcaaaacagcagtaaatgaccctggagaagttaaatacataaaagctgtaagcatcatttagtttttgaagagtaaagaggattttctctttttaaattacatgttcatgaaatgacttgaggtgacttttcatctaaagtataccttttcattcaaacaatgcacgaatatggacagcttgaacatctaagctcaaatggtacacatacttttaaaggtagtttattcaatctttaaacagaatttggagtcttaaatcagaaagaataaagtttctattgcaataattgcttatattgataaaatttgagcattagtacagtagggagaatatctgtttatgtctttctattcagcacaagtattgtgcccagcaggtacatactaaatgtactaaatgcatattgattaaatcgataaatataggaaagttggaatcatatagcacttcacaataaagtgctttcacatgtacacatccataagttatttgactttttataactctatacgtattgttgggtacgttttatcatcagcttctcaaatagtcagtgcaatttaaaagttcttttcaagatcacatggctagttaagttctagaatcaagaacccattcaccttcttctataacctcttccagtgatatggtactacaatacatatcccttactgtattttctgatgtgattaagcatatattgctgtatactcatataagccactatcaaatgcttattaactgtgatatgctcacttatttatttgtatcattgctattaatgcttacaatgattctaaaaaagaaatagtctacattttttcatccttattattttacataagaggaaactgaagcagagaaggctaaactccaatactattctctgcaaaagacatctagatgtacagcataccagcccatttaaaaaatacattttatttgctattagtaataatgaaaaataaaactagtttaaaaaaagaaagtagaattagggagcaatgaaaaaatatccaattggttcatctccaggaggataaataatcattgtaatcaatttttcaagtgaattggtattatttttatataatggaaaacaagcaaacaattaaatataggaaactattgtatttaaatatttttatgtattatgacattttcatttatcaaagttttgcccagattatgacaccatagtgatcaactcaataattatttaaataccagtgttcagaatagtgaaaacatgtttgcatatttttagttaatataattttatttcttggaatatacattttggatttttctctattaaaataattctacctcactatatttttcaaaaagaaaacatttcatcaggctcgatcttctctactgctgctactagaattactcttgtatgaagcaaaattttcagctggcaaagtcttacaggaaatttttcctttgaaattgaatttcgcatttattttcctaaaacacacacacacacatgcatacacacacatacacacataaaatcgtattcaacatttaggcatagcattatgtctctaacagcagcaacacaaataacaagtaactggttaaatgcaatgttcaggaagacaactggttgaatatcaacatatgaaaatgcctcctgaaaacaattacatctgcttttagcattgaggtagaactcattcttgtgcagggtttggttatgtcttccattttgctgtcaatatttgtattagaaattgcttactgtaatatttgaaatatttctaaaccagactatattgaacaattttctattattattctaataaatgctttttcacctcaagcagtataagtgttaatggatataaaagggaaatttggatgggaactagtttgtagaagccatagttaatttaagaaaatcacattttgtaaaacttgaataataagttgtcaattaaaggctgttttatttttccacctttggaaagttttatattccacagttagatctatttaaaggaagtttctattgtaataattaacacattattgttttttaaaaaattactgtaatcattaaggtctcataaaaatctctgtgattagactcatgacactctttatcaaaatgaaaatacagagagccccttatttaaaagacaggggagaggtgctgccagaggcactaaaatacatcatttctgtttcacgccatttttactttgcactaaataacacaaatttctctcacttgaataccgattcatggttcctctaccctcaaaactttggtatacgcaaaattttaaagtatcttgacctgaatatttctcaagggaaatttggttatgatccatacccactgtcaacagctgtcttttcatcatgtgaaatgcaagtacgcccaaaaaaagaaatttgatttttttttcatctcatgtttttagagcaggacagcaatcattggcctcagtatattgacttcatgtgactcagctgcccaatattgttccagccagctgtgtctatgggtgagagagggtcacatggtatcacactcagagaagcattaatggccttgctgaggcatttcccatcaaaccaaagggtgggcaagtcagtgtctgtgattaacacatgtaaaatatgaaagaagccatattattcaaatagtttaatttggcaaaatatctgttaaaaataaaaataggatataatgtatgcatttaattttaactgtaaatgtataagtgtgaatatattttaaaactttggggttcaagaccaagagctctgcttaaaagttagctgatggacagacctatatactttcttttcttttcttttcttttcttttcttttcttttcttttcttttcttttcttttttacacaaaccacactcataatgcatcctctgcaattttctgtttccatctctttaaagcacatcaagcaattacaaacacttgtaaatcaatttatgtggagaatcattttagaagtctgattttttccccagtttttgttatagttgtccagcccacacttactttttgaaagcatctttcaagtgattcacctttgtagagttgttttcaaggcatacaacttagttttcatagaaacaaccctctttattttcatacgcttattttcataagcttaagtaatatttaaataaattttgtaagtaaaaacaaaaaacaactggtataaagagatttagggataaacacatctgacacttggtgtacatactaccgaaacatagagaacagaagtgcggggacagaatagtctgccagccaaaggcgttcaacaaggatagacttcagtaaatatgcttaacagaaggagtggaaagcattgtttcatctggtaaactggtaaaatgcaagtcatttaaaaaataacttttattgtattcttatcccttagttctttaaatttagcttattttatttcagcatcctcaaactggtctctaaatagaaaaggaatctgaaaagccatattatttcacacccactaaatatgtaattaaacacttataccttatttaatctatataaagagataatatgggcatatttagatggtgaccttgaaatcaatatactgtttaaatatatgacagtgcagattattaagatgaagctcagaaatgacacttgtaatgcatgctgagtatttgaagtttgaaaaatatgacagcaaggaaagaatggtagaactattccggaaacttttcagaaaagacataatcaagagggtttacacacacacacacacacacacacacacacacacacacacacacagacatgaaacagaaaaactgcaaagactgaatttttttccccatggcaaaaatcagtttagtgatttttaaatggagattatacaaaggtcactaccttcaaacaaaccagctaagaaatgttaacaatcactaggaccagaataggtataattttggaggaagatgtgttctgttagataattagattaatatttgtattttaatatctggaagaaaaacattctgagaatatttcaagcctttgtttttatttagcaataattgagcttattctcctcacttatccacccatttctctggaacaattgctaatttatgtttcaagatttgtagtctcagatataaatttagtttttatattacttaaagcaaaaaatacagatttataacattcttcagtttaagaatatgattcatataatttcctgctttcaagaaacttttctcttcttagtaatatacattactaaaatatatactctaaaagggctagacttttcatctgttacattttgtatctatctctaaaacctagaaaagtggcataagtttaatgatctatcagttctcactgcatgatgaatgaatgccttgaacagtaagttttccccgatcagtagtgaaatcagcaatggctgtgtagcgagcactggtaaaatacacgttagtgtccacctgtgaacttttgtatgtgtattttttgagacatggtcttgctctcttccctaggctggaggtcattagtgtgatcatagaccaagttcaccactcgaactcctaggctgaagctatcctcctacctcaggagttgggattacaggtgtgagccaccatgaccaactaatttttaatttttttgttgttgttgttgagatggggtccgctatgttacccaggctggtctcaaactcctggcctcaagtgatcctctctgatctttaatgagtttctacaagggagattctggctgggagtgtgtgagcaatttcaaggactttgctacaacgttaaattttcttttggaaacaacgttactgtccgcattgtaaaagagtgctttaactatagtagtgagtctcattttaaaaattatattatttttgcttttttatgttaattttagttggcacacaaaaattgtatatgtttatgggatacaagtgatattttgatacatgtataaaatatgtcataatcatatcagagtaattagcatttcctatcacatcaaatatttagcatttatttgtgatgggcacattcataattctctcatgtagcttttggaaaatatgcaataagttattgttaactgtcttccccctagtccagtgctatataacactagaacttagtcctcttatctagctacaattttgcagctattaacctgcctctccctattctctccgtctaccctttccagcctctagtaaccactattctactctctacttctatgagctcattttttttacctcccacatatgagtgagaacatgtggtatttatctctctgtgcctgacttattttgtttaacataatgtcctctaggcccatccgtgtcactgcaaatgatggcatttcattatcttttatggttgaatagtattccattgtgtatgtgtacgatttttctttattaattcgtctgttgatggacattgaggttaattccctaccatgtaacagtaaattggttaattccctaccaatttactattacaataaattggtggttgctgagatctcttcgacatactgattttctttcttttagatatgtatccagcagtggaataactggatcacatgatagttctatttttactcttttgagaagtctccatgctgttatctataatggctgtactaattaatgttcccactaacactatataagagtttcttttctctgcatcctctcaagcatttgctatcttttcacttttcaataatagccattctaactagggtgagatgatatccattgtggttttgatctgcatgtccctaattattagtgatgttgagcatttcttcatgtacctattagtcatctgtatgtcttctttcaagaaatgtttcttcagatcctgtgcctatttttaatttgttttatggctgttgagttgttctagttcctcatacatatatctggatattattcctttgttggatgattagtgtgtaaatatttgctccaattctacaggttgtctcttcactgttgatttttttcttttgctgtgtaaaagcttcttggtttgacataatcccatttttctatttttttttgctcactgtgctgttgaagtcttacccataaaacttgtgcctagatcactgtcatgaagtatttccccctgtgtttccttttaataattctatagttttaggacttacatttaagtgttcaatccattttcaggtgatttttgtacatggtgagagataggagtctagtttcattcctctgcctatgaatatccagttttccaagcaccaattattgaagagactgtcctttcctcaatgtatgttcttgtcacttttgtcaaaaactagttggctataagtatgtgaatttattttgggttctgcagtctgtcccattgatctatgtgttggcttttataccaagaccatgtggtttggggtactatagctctacagtatattttagtcaggtagtgtgatgcatccagctttgttctttttgctgagtaatgcttcggctttgcaaggtcttttgtggttccacaccattttttggattttttttctatttccatgaagaatgttcttgatattttgataaagatttcatttaatctgtagttcgctctgggtagtacaatcatttaaacaatactaattcttccagcctatgagcatgatatgtctttcaaatctgtgtgtcttttttaaattatttcatcagtatgtggtagattttattacagagatattttacctccttagttaaatcatttaaacatattctattttttgtaattattgtaaatgaaattcctttcttgatttgtttgcagctagtttgttactgggttatagaatgtttactgattttgtgtgttaattttgtgtcctgcagctttaccgaatttgcttttcccttctgagaaatttttggtggagtctttagacttttctacatataagataatgttgtctgaaaagggatacaattttaattattttctaatttaaattcccttaatttattttccttgattaatcactctgcccaagactattagtactatgttgagtaagagtgatgaaaatgagagtctttgtcttgtatcaattcttagaagaaaagttttcagcttttccccattcagtacgatgttaggtatgggtttgtcatatatggcctttattgttttaaggcatgccccttctatacctagtctgatgagtgttttaatcatgaagaaatgctgaattttatcaaatgctttttctatattcattgacataatatttttcttcattctgctgatgtagtgtatcacatttcttgatttgtgtgtgttgaaccatctgtacaaccctgagataaatcacacttaattatagggtattatcttttgatgtgctattagattctgtttgctagtattttatttatttatttatttttaaatgttttcttctaagttcaccagtgacattggcctaatagttttctttaattgttgtgcctttgtctggttttggtataagggtaatgctggtgtcgtagaatgaattagaattacctcctcttaaattttctggaagaattcaagactaattcttgttcttttaaagtgttgtagaattcagcagttaaaccacctggccctggaatttcctttctgggagcctttttattatgatttaatcttgttacttattactaatatgttcaggtttcctttttttttttctagttcaatcttggtaggttatatgtgtccaggaatttagtgatttcctcttggttttctaatttgttggcatatagttgtttgaaataatctttaattatcctttttatttcttgctatcagttgtaaagtttccatttctggatttttttttattacttgagacataattttttcttagcttggttaatggtttgttttatttatcttttcaaaaaaccaactttttgtttttttaaattgttattttttgtttctgttttatttacttttgctctgatctttattatttctttctactaattttagatttggtttctatgtgcttttccagttccttatggtgcatcattaggttctttatttgaaatctttctaccttttttgatgtaggcatatgatgctgtaaactttcctctgagaattgcttttgccatatccaataggttttatttgtttatttatttttttttcttttttaaaaaaaatgggataatgtgcagaacatgaaggtttgttacacaggtatacatgtgccatagtggtttgctgcacctattgacccatcctctaagttctgtccccttgccccccaccccccaacaggccctgatgtgtgttgtgccctctctgtttccaagtattctcattgttcaaattccacttatgagtgagaacatgcagtgtttggttttctgttcctgtgtgagtttgctgaggatgatggcttccagtctcatcctgcaaaagacatgatctcattcatttttatggctgcatagtatttcatggtgtatatgtaccacattttctttatccagtctatcattgatgggcatttgggttggttccatgtctttgctattgtaaatagtgctacaataagcatacatgtacatgtctctttatagcagaatgatttatattcctttgggtatatactcagtaatgggattgaggagtcaaatggtatttctggttctagatccttgaggaattgccatagtgtcttcctcactggttgaattaatttatattcccaccaaaagtgtaaaggcgttcctctttcttcacagccttgccagcatctgttgtttcttgactttttaataattgccattctgactagcatgagatggtatctcattgtggttttggtttgcatttctgtaatgatcagtgaggttgagctttttctcatatgtttgttgatcatgtaaatgtcttcttttgagaagtgtctgttcatatcctttgcccactttttgatgtggttgttttttcttataaatttgtttaagttcctcataaattctggatattagacctttttcagataggtaggttgcaaaaattttctcccactctgtaggttgcttgttctgatgatagcttcttttgctgtgcaggagctctttagtttaattagatcccatttgtcagcttttgcttttgttgcaattgattttggcattatcatcatgaagtctttgtccatgcctatgtcctgaatggttttgcctaggttttcttctagggtttttacggtcttgggtttcacatttaagtctttactccatcttgagttaatttttgtatgaagtgtaaggaagaggtccagtttcagttttctgcatatggctaaccagttttcccaacaccatttattaaatatagaatcatttatccattgcttgttttgtcaggtttgttgaaaatcagatggttgtagatgtgtggtattatttctgaggactctgtcctgttccactggtctatatgtctgttttggtaccagcaccattctgtttcggttactgtagccctgtagtatagtttgaagtcaggtagcatgatgcctccagttttgttctttttgcttaagattgtcttaactatatgggctctttttttatttcatataaaatctaacatagttttctcgaattctgtgaagaatgtcaatggtagtttgatggaaataacattgaatctataaatgactttgggctatatggccattttcataacattaattattcctatgcatgaggatggaatgtttttccatttatttgtgtcctctcttatttccctgaacagtggattgtagttgtccttgaagaggttcttcacatgccttgttagctgtattcctaggtataccactgtctttgtagcaattgtgaatggaagttcattcatgatttggctctctgtttttctattgtttgtgtaaacgaatgtttttgatttttgcacactggttttgtaacctgagactttgctgaagttgcttatcagcttatggtgtttttgggctgagacaatggggttttctaaatatagaatcatgttgtctgcagagacaatttgacttcctctcttcctaactgaataccctttatttctttctcttgcctgattgccctggccagaacttccaatactatgtagagtaggagtggtgacagagagcatccttgtcttgtgctggttttcaaagggaatgcttccagcttttgcccattcagtatgatattggctgtgagtttgtcataaatagctcttattattttgagatatgttccatcaatacctagttatttgagagtttttaacatgaagatgttgaattttatcaaaggccttttctgcgtctattgagataatcatgtggtttttgtctttggttctgtttatgtgatagtttatgtttattgatttgaatatgttgaaccagccgtgtatcccaggtataaagccaacttgatcatggtggataagattttgatgtgctgctggatttgttttgccagcattttattgaggattttttcatcaatgttcatcagggatattggcctgaatttttcttgtttttgttgtgtctcttctcagttttgttatcaggatgatgctggcttcatcaaatgagttagggaggagttcctcctttttccactgttttgaatagtttcagaaggaatagtaccagctccattttgtactggtaaaattcagctgtgaatccatctgctcctgggcttttttttttggttggcagtctattaattactgcctcaattacagaacttgttactggtctattcagggattcaacttcctcctgttttagtcttgggagggtgtatgtgtccaggaatttatccatttcttctagattttctagtttatttgtgtagaggtgtttatattattatctgatggtagtttgtatttctgtggggtcaatggtgatatctcctttatcattttttattgtgtctatttgacatactttcttctcagtgccacatggcacttactctgaaatcacccacataactggaagttaaacactccacagcaaatgcaaaataactgaaatcctgaaatcataacagtctcttagactacactgtaatcaaattacaactcaggattaagaaactcactcaaaaccacacaattaaatggaaattgaacaacctgctcctgaatgactcctgggtaaataatgaaattaaggcacaaatcaaaaagttctttgaaaccaatgagaacaaagagacaatgtatcagaatctctggggcacagctaaagtagtgttaagagagaaatttataacaccaaatgcccacatcagaaagctagaaagatctcaaatcgacaccctaacatcacaattaagagctagagaggcaagagcaaactaatccaaaaactagcagaaggtaagaaataactaatatcagagcagaattgaaagtgatacggacatgaaaaaccctttaaaattcaaagaatccaggagctggttttttgaaaagattaacaaaatagatagaccactagctagacccataggttttagtatgttgtgtttcaatttctatcctcattgagaactttaaaaaaaacttttttttattttcttcattaatctattggtcattcaggagaatgttttttaatatctatttgtagagtttccaaagttcctcttggaactttctatagaactttcttggaacgtttctctcttgtttctatgctagttttattccattgcagtctgagaagacacttaatataacttcaattttttaaaaaaatgttgaaacttgtttcatcatctaccgtatggtctatcctggagaatgtttggtgggctgatgagaagaatgtatattctgcagctgtcaaataaaatgtgttcttaatatccgttgggtctgtagtgcagattaactccaatatttatttgttgaatttctgtctcatgagctgtccaatgcagaaagtggggtgttgaagtcctcaactattattgtagtgggtatatcttttttttttcttttttgagacagtctcactctgtcacccaggctggagtgtagtggcatgatctcagctcactgtaacttctgcctcacaggttcaggcgattctcatgccttagcctcccaagctggaattacaggtgtgcaccaccatgcccagctaacttttgtatttttagtaaagacaggttttgccatgttggccaggatggtctcaaacttctgacctcaagtgatctacctgccttggcttcccgaaatgttggggttacagtctgatataactattgctacttttgcacagttatggtttctatttctcaattttcagtctatatgtgtcttaacaggtgaagtgagtttcttgttggcaatgtgaaattgagtctatttttaaaaaaaaatctattcagctagcctatattctaaattgtggaatttaggcaggcatggtggctcatgcctgtaatccaaacactttgggaggccaaggcgggtggatcacctgaggtcaggagttcaagatcaggctggccaacatggtgaaaccctgtctcttctaaaaatacaacaactagctaagtgtggtggcgggtacctgtagttcaaactactcaggaggctgaggcaggtgaaccacttgaacctaggagtgggaggttgcggtgagccaagatggcaccactgcactccagcctaggcgacagtgagactccatctgaaaataaataaataaataaataaattgtggaatttaagccagttacatttaagttttttattgagatgtgtggtcttcctagtgtcattttgttgatgtttttctgattttttgtatactctttgttgttttctttctcttttatttttttatctttgtaatttggtggttttctgtagtgatattgtttgatgcttttctttttcctcatttgtgtatctgatctgccagtgagtttttcacttttgtgtattttcacaccatggcatatattgtcatttcacctccagatataggactcctttaggcaattcttatagtgctggtctagtggtgatgaattcccttaagtttcacttgtcttggaaagaccatttttccatttctaaagaatagctttactgagttttgcattcttgactggcatggtgttgttgcttttttttcccccagcactttgagtataacatcacattctctctcttgtcccataaggtttctgttgagaaatctgctgtttgttactgtgattggaatttccttatatgtaacttaactcttttctcttggtgtttttagaattctctcattgtctttgattgttgacagtttgaatataataatccttggagatgacctttatgggttaaatctatttggggatttttgagcttcctgtatctgaatatctacatctcttccaagacttaggaatttttcagctattattttattaaatacattttctatgccttttgaaatctcttctccttctgaatgtcctaaattgtgaaaatgtgtttgtttaatgtcccatatatcacataaatgttcattattctttttttcttttttatctgacttggttatttcaaacctgttttcaagttaagaaattctttcatctgcttgatcaattctattgttgaatattttgattttatttttaaatttcattcattaattcttcagttccaagatttctgttttgttctatttaaatgatattttgcattggttcattctaacattcctataaagaaatacttaaatttcccaagaaatttatttaaaaagaggtttaattggctcatggttctgcaggctgtacaggaagcatagcagaatctgcttatggggatgcctcaagaagcttctaataatgacagaagacaatggaggagctggtacgccccatggcaaaagcaggatcaagagagcaaaaggggaggtgctacacacttttaaatgacaagatatcatgagaactcactcactatcatgaggacagtaccaaggagaatggtgctaaacaattcatgagaaattcacctccatgatccaatcaccatccaccaggccccacctccaacattggagattacattttaatatgacatttgtgcatgagcatacatccaaactatatcatatctatattcttgttgaatttctcatttagatcataaattgtttttctgatttattttcattacacttgttctattttttttttgctgagttgtctttacaattattttgaatttcttctcaggcattccataagtttctttttccttggggtttgttattgcagaattattgtgtacctttggaggttcatgttttgttttttcatgttacttgtgcccctacattgatatctgaacatctcatgtaacagttgcttctttcaattttaggaagtatattttgtggataaagacttcttcctgtaaatatatttataatgtcagttgggcaaggtggtttggctttggtgggttcagtatctagttcctatatgatttattttgctgtaatcaatgacagcagtgtctgcaaatttctcagtagcctaggctgtggcatggtttttctgagtatgaatacaacaggcaggctagtcctcaggtttctggcagcatgtatgggtgtcagcagtggtccttagtcagactggttttcaggcccctgggtggcatgtacattcttgtagtggtggtggttagctctacataggccagtttttgtgtccctgggaagtgcatatgggtgcaagtgacaccactgctggaggtgcagggtcactgtcaatggtggtggccccaggcaagtagttatcaggctctgcagggcatgagcttcagctccttgtgtcttgggggacgtctcctgaagtgtcaaagcccctgttccctaggatatggggcactgcatgagttcagtttcagagtgcacaggtgcaccactgtgtagagctaaggtcatgatgcagtggccctcctggtggatgaagaggaatgttaacaggtttcttgattgtgcttctgcaggaggtattgggccccagggcaatactctggtgttggctcttctttcaaaatggtgctgtgctgcagcagacagtgtcctggggagtggggagaacccaacatgaattccctttgtggaataatgcagttgcgtggacttcaagcaactccctatatactaggcttagggcctgtgagggctgaggggctcttttgtagctagaattgcaggtgtttgtcgtgaaaacatgaaccctgggttttttcttacccgttccctgtgctggggagttgtattggctctaagccaatcccagctggatttgcttagctttctatgctgtcattttaagttttagtgctgagcgagtctttgtaattccttgctgaatgctaatgttcttccttaggcactctatttgatgtgttcttatctatttgttgttttggtcctttttagtgtggagaagggaagtgctaggtacctttagtccaccatcttaatgacatcccaggtaaaatttattaattggataaatatatccatttatgctattgtaacaaacattattttcttcatattacactccataaactatctgcatttaattttgctgtattatgatgtaagttataatatattttatctaatatttcatgttaaagcaaattaaagtagagaccaggcctgaggaatctctaagcagacaaagccacctagacataaggaaccttaacattgtttaatttacaaacataagcaaaacttaatttgagctacttattgttattgcctatattaaagaaaaaaacttaaggctaaccaggcagactttgtcaactaatatatagctttataactagaaactttgcagcagaatagatcatataaagcaacgtataactgcaaacaatcaaatttttttctgctttactttcatgttcataagccctctgcttatattccctaggcaaagcccccaatccacttctggtatggagctgccagattgataagtcactgtttgttcaaataaaatcttcaaaaattttattatgcctcagtttaccttttaaaattaataattttctacatatattaggtaattgatttttattttataatttccaatggtgtacttgtcatatatcattttgttgtgtatgttttatcatatctagagatacatattatatttcaatcaactattatcctattattgttttaatatcatatcatatcatattattgtgatttacaaataggttttaatatcagaggaaaatatgtaaacccttaactggcaatatttttccctcagaagttatagaaatctgaagcagtaattcatctaaattgactctaaaattatttgttgaagctataaaacttttatgacatctaacaattgcaatcagaatttgttacaactaataattaatttaggataaatttgaatgttttaaatactgtcttcttatcaaagtacatgatacattgttccatttattaaattctttattgccttttgatataccatatagctctcccagtatagattttttcaaatttgcatttgcaccataaattttaagttagcattttttgctatctagcgataatgaaatatattcccaatatacttacaaatgcactgtcactgaaatatgtgacaatactattgaattgtatatgtcaattttgtagctaattagatctttaaataggcgtttttttataatgacttgggattttcagaaattgttaatatagaatacaaatactattaattttgtctctcttttgaaaaaaggcaaatagtaatacatatttacatgctattcttaaattttaaggaactgttttgattatggtgatatttgctttttgtttaagaaagtttaacaggattgaatactaatttcaaccaaattacctcttgctatatattttgattaaatgatttgtttattttacaactaactgtgttgcttaatattaatttaactttgaatattgaaatgatttttaaaaatattttacagcgcacttttgaaatttaatctgcttgtcttcgtgcattacttttgacctatactatgagattttatgtaataataagattttatacatattggctttctaaaaattaaattttgggttttttttttttacatttcaacttcataaaactatctttatctggctctctcttttttttttttttttgagacagagtctgtcgcccaggctggagtgcaatggctggatcttggctcactgcaagctctgcctcccgggttcacgccattctcctgcctcagcctcccgagtagctgggactacaggtgcctgccaccacgcctggctaatttttttgtatttttttagcagagacggggtttccccatgttagccaggttggtcttcgtctcctgacctcttgatccgccgtcctcggcctcccaaagtgctgggattacaagcgtgagccaccgcgcccggccatctttatcgctctctccccttatttgagtagtttaactgttgtcttttctgttagtatttttctcctaaaatgatagttcttgagtttggttagtgctctatttctcttcattattttttcttctctcatctgtgtttcccatgtttcttgaggctcactttaataataattctgctaattgattgattttatttaattaaattcagtaaaattttatttgggttccaagtttttggcccaattctttctcatatatagctttttaactttaattaacttataaattattttgattctatcatttagcttgattttgccatgaagcaactaaagcagagtatgagtttgttgcagattttcttttatttctacaattttgcaacatcattaaaaaaggaagcctgtaaaatttctcctttgatgacttttgaaaataatttttatctctgtgtgtgtatttgaatacgcgtgtgtatgtgtgtgttatttaacccctaaccaatgattattgtttcagactatttcataggtccttaaaaatgacatatgtcttctctattgtttatagttgtaattatttaataattctacagcattcagcacattccattttctcctatcattcacttttgcccactcgattgctcaagggttaaatgatttctaaaatagctgttccggtgcatttttgttgcattgtaaaatattttttaaaatatattcatgtcatttttatgttgcattaaggtccacgaatgttagcttatctttttggataacttcatttatttaataatattttttctgatttctacattttaatgtaatcattgtgatatgtagttatactgatgttattgctattgattagactgaatcatttcactatgaagataatttgtaaaatatgttttagttttgctgtttatactctttagaaaatacacagtaaagagaatgctttctgaattttctttgtgattgatttgtttttgttgtttctttgtaactgcacatgagaattatatttttagcaaagaggttttaaactagtttatttttatattccaaattaatcctttgctgactttcgtaagttttcctgttatattgtggtggtggtggttgctgttttcttgatttactatgcatgctctatacactgcttatcctctgactttttcctccagcattgattttagcaaaagtatatatcactttaattattagctttctacacttgagataggtaatattatccatatttcaaaatacttttagtaagaagcaaatgtttaaaagcattttttgtcactagccagttaaaagtggtaaaaactaggactttaacataagtctgattttaaggcccatattatacacacattgcagaaatgaaaaagaaaatctacttgtacatttttccaaggctaatagttcacatactgagctataaaacagtatttgatactgcaagagaacatgggctgagatgaaatgggatgagctcatttcagtaaagtatatctgtgtatttcagggtctgtgtgcgttaattggtgtaatattttagaagacatgatcagtaattttcatttgatataagtggccatttggcaacacggtagtgctgtaagaagctgagtattgggatcaaaaggacacttgccttagctgactattacctcttatttaatatacattaaatagactataagtcaggaaaccttgtaaagaagctatggcatcatttatagttattgaaaataatttaactaaattctgatagaatgattaaaagaaactgttatacagaagaaaatgtacaaacaaagggttagaagaatttggtgatgccctaagtgagattagaagtcacctgaaaatgacagagaacctagtctttgtgattgccaaggtcaacttaatacatgacaagagtttggttaaaagcaaaatagtattatttttacatatgttagtttgcatacagttgaaaacgattagggctaaaatataagaattatgactataaacacgtctgtatctgaaagtcacacacagataaatatcctattataggttgtagaaatgccttcctatactaccttatttacctcaaccagagtaattggaagcaacacatatggaaggtgggatacccatcaaaggagtattttggtggcatttgtaaattatttctataactaagaacacattaataaatctagtacttaaatgtgtaggaatattttgaagcttggttatcctatgaatttctgagaatatcaattaactgggacatcagattttttcaaatatgatgtaatattgtattaaaataacatatttctgaagagaaaaacagatcaatttgtaacccaaaataaatcaaactagaagctgactcatgtaaagaacataatcatgatggataatctaagagagaaaaaaatgtttggttgtgttttacatgtgttgatagatttcacccctatgagaatacattttttaactgttatgtcacttacattgtaatcagataaacaggccattgacaggtagacaaataagtgaacaaaatgacttcaggaagaaataattggtctgaaaatacaaaatacagggatatgatataagattaccagaatatcaaagagatatctgattcattaatgtgatggtacatttaattaatattaagtacaaaaaaatcaaattttagatccaaaaaggaaggtaacttctagtgaattctattgtaggtttatcatattccaactaataatgtgaaaaataggaaagaatgatgccaacatttagagtaaagcgctgagaaacgatgaattaagatcaccaatttcatcactaaatgttagcccttacaatccttgtaattcattggttccactgcttgagctctcagaatatatacagactgtcaaatacaggcagaccaataattagtgcatgatattaaggatttcaaatgataaattctatatatggaactgcttaaataagatggtatataactaataagatttctccattttgtgcttgaacaagtttcttagtttcaacaaataaacacacacacaaacactcagctaaatttaaatttctgataaacaaataatttcataatgtaattacattctaaatattgcgtgaaataaatgtatactaaaaataatttgttttttttctgaaatttaaatttgactaatcatcttgtactttagcaaacctaggctgataagatgtaattacatatgatattaaaaaacttggataaaatattgaattttttagcttataattcaataccaaggctctgggagaatatgggacattgtagaaaaataggattctctaaaaaatatcaagctattggtgtgtgtcaaagacttacattcactcttcagtaaggtgttaaaggagacagttgtcaatgttactaaagagaggaacttcaatttaagcttacctgcttgaaagaaggggaacagatacatatatagttgtgagaaaagaaagccttcctgcttcttgctaaaaatccaacagtgctaaggatctataatttgcaactgccaaaagtgacttgcctgccccaagctaaagttgtggccagccaaaaaatgaaggtcagaaatgtcacaatttagcttgacatctaaggggaaattaaaacaaaacaaaaatcaaaaagggatctttttatttattgcttgctaaaatacatcaatggatgctgcgtttggcagagataatagtatccttacccatagacacaatttaaaagatggcagatagggggtggtgtgatttgttttgtccattatttctcattaattagagtcaaatatcaagtaatgaagtcacaaattgaggcctacaaatctatggataaaatacagaaaattcaagcgtaggctccacattcaactttcatgatttaatagatttctgctgctggagattaagaaaggcctctcctccccattaaagctttgggcagcagtctaaagttttaagaaaattagagctctggcatcaagctgcatggagaatgtatgatttttccttctaggaggctcatatcaacagtgaatgggcagactacagatcagcagccttgaaaacatgtcaaggatcaagttactttagtattcctgctttatcggaggtgatgtaaatcctgtaccagtgatcactgtatattttttcaatttacagccttttctaaattaaaattgtggctgggaactgtggcttatgaccacaattccagcactttgggaggccaaggtaggaggatggcttaaatccaggagttcgaaaccaacctgggcagcaaaacaagaccccatttctacaaaaacaaacaaacaaataaataaataattgaaattaaaaatttttttaaatggaaacttaaaaaaatagaatttatttggttgccttgtttttccattcactgttacattttctgtgtggagtcatgtttaaattatcagatagttcaaaggttgcaagttttaaaaagaaacatctagatattttaggtttatatgtacctcatgttcatattctgcaatatgatagtacctataaataaaggcataatggctacctctgcattcatataattggtatatgagagtgttgcattggattagaaattattgaatgtgtatatttaagtgaagatagctatctacatactttgagcatgtgaggcattggatcttgagtaaaagactacaggatttattgtttatctgagttcattatctgatttctttatgtgattatagtaaccaaggaggagcacccttttcaccagggattgggttataaatagccaattgactacttgtttcacatcagaatcaccaaacttcaaacaattatcactttttttattttttagacaggatctcactctgtcacccaggctggagtgcagtggtaagattatgacttactatagcttaggcctcctgggctcaggtgatcttcctgtctcagccccctgactggctaggacagcaggcatgcaccaccacaccaggataatttttgtttttgttgagacaggcttccctcatgttgcccaggctggtctcaatctcctgggctcaaatgatcctcctgccttggcctctcaaagtgcttggagtacagacatgagccacggtgcttaaccaagataaaagcttatggctccagagtttacaggtttcatattcactggcagaaggagatatgagagagaaaaaaggattcaggaagaagaggagaaagaaaaaaaaaataaagtactctaaaagaaaatgaacctatagactattgttttcaatctggatgttgcaaaatatttgtgagttataaaattaatccactggttgatggtcaataacttatttttttaaagaaacaataaagtagaattaaataggatggaaaatagaagtattaaaatcatcaatgtgcatcatatagagtaaaaactattgttttattacacttttatttatttgtgcagtatatgtgtacatgtgtgattttctaggattgtgatgtaaaatatatttcttactttaagtagttgttcaaaaatgtttgaaatgcagtgaacatattctacttccaggagcttatcattttgatgtataagctaccccaatattctctctactatcttcatttcttatttttatttcacttatattaatgttataagtactttatacacactaagtcatgtaatcctcccaacatccccatgaaggtgttactattattatcccaattagtgcagtgatataattgaaatacacagaatttatgtaatttgccaaagctcactcagttggcaaatggcagggttaagatttacactagcacctggaaaactatcgattgagtggaagcaatgaaatacaaaacaaaatctgtattttgtaaaaatatattataaaatgtttcatgggaaaaagacaatgctcctgaaactggaacagatactgtcatattaacagtggtgcgttagaatggaagttacatcttcttgttgctgagaaccttaggcccatcctggaccagttccaggtcttatgagaatgtggtacactatgataactgcttagaaattgctgagaaatccttgaatctcgaaatgccgacataaatctttaaagtggtcattatttacaataacattagtaaccctttttcttgaaaactaatagtataatacaattagttgttaaaattttttgtttcaaaatagtacttataatatctatccagagaccaaaacaatatctttggtaattaagaaaagtgcaatttatattttaaaataaaatattgaatttaaagtggttttatctttatgtgataatatttaattagctcataaatacttaagattatttatttattttttgagatcgagtttcactcttgtttcccaggctggagtgcaatggtgtgatttcggctcactgcaacctctgcctcctgggttcaaatgattctcctgcctcagccgcccaagtaactgggattacaggtgcccgccaccatgccaggctgattttttttttttttgtatttttagtaaagacggggtttcaccgggttggtgaggctggtctcaaactcctgaactcaggtgatccacccgtctcggactcccaaagtgctgggattacaggcatgagccactgcacccggccaatacttaaaatttttaataataaagtcagggaatgaaccaggctcccaaatgaagatgcagaaagcatagctaagtattatctaatttcatatatatataaagctaagcattacctaattgtttatatatataaagctaagtattatctagagagagagatatatatatttacagcaatttataaataatgtagccactgcacatagctttagaaaaatagaaaataaagatgctcatagtcatccttgtacctgtctgtgtaagataccccctttatgctaggcattttatgtacttcatttcaaaacaataatgagacctactaaactgagggtcagtgagattaacgaaatggcccaagaccttgcagtgcattggctgaagaataaacatgaaattccaaatttgtctgagtccaaaatacgtatcttttcaactacaatgatcttgcattttttaatacaagctggacacctctacaaaaaggaggaatgtagaaaacattatttattttcagaaaaagtaaaaacagacctaagttcagtagaaaaacatgtttctatgcctaaatttagcttgtgacagagactagtcattaaatgaactcattttcacacgggacatcttggtttatgcgttgagagagaactaagttggatggagtcagcgtagtgtagagtgtgtaaccgtggtaattgtttcaaactgtgggcctttttaacttaaaattgatttcctttctgtactaatatggaaagacatgataaagcaactacaaagaatttagtactaacatttctgaagtcattcacatgtctaggttatcttattcagatattacagccaaaagtgctataaaatctttgtgaagagatgaattttaccaaatttcaaacagtttttactatcttggacttttatgagcatggttgaagatgcaaactttgcagagaagaagttaaaatttttctcagatgtgcatatatactaccaagatcattatatcagagtcaagagataaatgtccctacattaataaatagataaataatttaaccgtctaaaaggtaggcagtcccaccaagatgtcttcatcccttctttgcaacacttttatctctttcactgcgatcttaatttttattcacattaggtatattacccttaattctcctctttaaatgtcttagatgctcttagcaacatcaaattctgatgactcccatcgtgccttcacagttttaagtatattttactgctctgtgacttgcagggcataatttaaagctaaaatgtaactgtttaatctttcttagttcagtaaatttatgtctatgagaaatggaagaactgcaggagggataatgctccagtgaattaatattttcgaaccaccttaccacattgccacattttctcagctgtagggctcagccgagcaggaaaggccaagggaaatgtaagggggcaatggctgttccagtgatggtgaaaacattggcatagctgtttgtagcaatgctcattgtcactgtaatggcattgcaagatcacctcaataatatttaaacatagtcatgcaaatatatttctaaaattatgattttgagtttacataccatattctgaaaaccatagtacaattctacattcctgtattctgaaaaccatagtacaattctgcattcccatattctgaaaaccagagtacaattctacattcctgtccaaaatttcaaacatagctcaacgacaaagatatgtgccaatcagaaatccttctgcctccacattggataatgagtcattttaaaatcaatgtaaatacatcaattctctgctagaaaataaagtgggttagaccacacatgtgaagatactgaatgtaaggctttagataggatactctgacaatatttgtatttactcttcaagcctatacgggtagttgcatatcttttcacacaccactgaaaagctagatgaattctaattatgtgaatttaaactgactgttgtgaataagattctgtcttctagcattaaatctgggggggggcgggaaactagcaggaagcaagtggctaatgggaaagtaattgactttctatggctacacatttcttattacacaaaaaataaaaaacaaaaggggtattgtttaagaaaaattcaaactgtatttttctctgctctcacaccacaacaatcaacaacacacaaaaggacttctgtggccaaattggtggtgtatggtgggggttgatttctgcatcagacaacaatagggtgtcctccaattcaattctgactctatctacatggagataagtgtcagattccacaggtggggagctcagttttcaaaactaccctccctccggacactagtcacgaaagtaggtctctgaaaattctgaacaagcagcttcgagttgggttttccagaaccagtaattttctacagcagctcacagtattcagggaaaaactaaatgtgccagtttattataaaggatattacaaaggatacagatgaagcaatgcctaggatcaggtatgtgagaaagggcacagagcttccgtgccctctctgaacgtgttgccttctgggaatcgccacttgttcaggtatctgtaaactctctgaatcttgtcctcatgggccttttatggaaacttcactggataggcatgattgacaagtgtgtggaaatgtgactggacaaaaggagtataatcttaacccagcaacgcttgtctgttcagattcttcttggcctcgcatgcagtattcctttcttcagtgtgtgcggcaggaccccctctggaatgaaggtcttaggacccacagtcagattagagttctgccttaggcaagtgaaaggaaggcaggacaaggttgaagagagagattctgttttctgaggcccaaagtcccccaacattatgaaaaaggatatgggagttatgaggcaaaaactggatgaaaaaatacatacgtaatatgacaaacacataccagtatattgcagaatgagagcaagaaaagttgccctgccaggcgcggtggctcacacctgtaatcccagcactttgggaggcggaggtgggtggatcacctgaggtcgggagttcaagaccagcctgaccaacatggagaaaccgtctctactaaaaatacaaattagccgggcttggtggcacatgcctgtaatcccagctactcgggaggctgaagcaggagaatcgcttgaacccaggaggcagaggttgcggtgaactgggatcgcgtcattgcactccagtctgggcaacaagagtgaaactccgtctcaaaaaagaaaaaaaagaaagaaagaaaaagaaaaaagaaaagaaaaaaaaaagaaaaaattgctctaataatttgctgattaaaatgcatacatctgaaaagttattcagcacaggaaagagaatactttctcagaaaaatgtatgccttttaactaaatataagataatagcatgcaatacagatatatatatatacacacattccagaggtgtcaagaaagtgagaaaaaaaattctttaaaaaaagagaaataatacaataacagagaagatagcactaccaaacccagcaggtagggtacatacaatcctttatgagttagaactttggatacaggagaaaaacatgtggccctttttactggaaataacattatccatttgacaaggatagatactgagaagaaagtccgccttaccaaatttcgagtttcatgactgtcctcaaacaggtttggggttagaatttataccacacctgcttccagaaaaacacgcgtaaataattcagtttgaatacacctaagttaggttgttactttatttccctgggaaaaacaaaagtaaaacttaagtaaaacaaatctcaaaaaatctccctcaaaagtgttcccagatagtggactccgtaatcacgataagaaagataatagaaacattaaacaaaaccctgaggcagcaaatattaaacttaacagaaatagaatgtgaagtaaatctgtttcatatattcaaagaaaaattgttaactttaaaaaatctctgggattattaacaaaaaaaaaaaaactccagacatataaatactaagccaaataagacaggtataaattaattgatatgagacacactaaacaaattagacattaatttttaataaatcactgcataatggtaaaatatttgattcagcaagaagatatagccatctcatgtgaaattgcccagtaacatagcttgaaagtagatggaacaaaaacttgacaaaattccaagaagaaatgaaacagaattcagaatcatattgagggattttagcacacacttcctggaagataaatcagacaaaataatctgataaatcagaaaaaaatagataattgaggatttgaacaacacaaggaacttgacctaattagtagatatgaaaaactcactcaatacctggagaatgcacattgctttctagaattcatggtaaatttaaaaattgaccttaaaataattagcaaagtaaacttcagtaattaaaaaatgatattatatatatcttttactgaccataatgtaatttggaaatcaaccaaaaacataactaaaagaaacaatttagaaagtataataagctgcactgaagccaaacacaggtaaaagaatcagtcacaatagaaattagaatttatttacattgaattgtttgccatcataacataggtaaaaacttttgaaaatatacttaacaggataattttatctttaaatgtttatttgagaggaaaggaaatccatgcccaggttctaacttaggagtttataaaaggaataacagaataacggcggtggatagctcatttaaaacaaacacacacacacacacacacacacacacacacacacacacacacagagaatcaacaaatgtaaattcttgtaatttcaaatctaataaaattgatcaacttgtgacaaaattgatgaatagatacaattaggagttgaaaagaagataaaattcaatatgtagtaaaaatattaaaatgtgatagaaaattatactctcaaataagaaaatgttcttttaaattgaaatttaactagaaaaaaatttccatgcctaactaaaaataggtaatatgagtagtctcacattatcaaataacaaaatcaatacttaaataataaccaaacagttatcatcattcccgaatcattttaatttgaattctttgcaacatttgtggagtaaataattctagccttaaaacaagattaaacaagaacaacaaatctcttcaaatttatgaatcttatataaatttgatacaaaaactgtaggagaatgagaaactacaaattaatgcactcataactataaatgaaatttaacattaatattaaaatactaaatccaacagtggtttaaaaatataatcctcccccaaaattcaaaatcgaatgaacatttgaaaatccaccgatgtaagtgtctggattagaagattaaagaaaatcagcatgtttatttcaatggatttaaaataattattagattatgttcaataccagtgcatgatccaattgaaaagaatcttaaatagaatgacacaagtaatttccttagtttataaaaacttgcaataataattccatttaatagtaaattttaagagcttttccttcgaaatcaaaagcaagtaaaatattttcaccatatctcttcaattcaacattcagtgcataaataaacaaataagccaaaattaagttgacatgattggaaaaaaaagaaacaagatagttagcttttgcaaagtgaggacaagtttatgtacatagacaacctgggaggatctacagtcagataattagaattgtaaggttgctggctggattagtcaggttagcaagaatacaatatagtaattaaaaaataaacacaacctctggtttgattcacgcacacatttattcttgcatataccatgtctgatcttggcacaagaaactctccatagtgtgtcctacatgcagtgattcagtgatccaggctgatccaatctcataatactgctaactccacaccaggcctctgcatctctcaagcagggtaggcaattgccttcgtccctctgtgctgctataacagaatagcacagactgagtaaattataaaaaagagaaatttattttctcacagttctggaggctgagaagttcaatatcaaggtgcaagcattagtgtctggtaagggcttgttccatcgatggcatcctctcacagtgacatcctcccatggcagaagacacaagtgcaaaaaggggcaaactcttgctgaagcctcttttttattaatccattcatgaggacagagcaccatgacttcatcacttcccagaaggccctcacctcttaatctcatcacaatggagattaagtttcaacatgaattttgtagaggatgcattcaacccgtaacagcaattatgttcacacattaatataaaaacaaagatctatctttataaaatgttaaacatttattttgcattccaaattcccagatcctagagttaaaatcattatgaagaagtttttgagcctctattatatggctgtaacatttacaaacctccaaatatttcaaagccactgttttggtattgattaaatgagaataaaatgtgttatgagctcacctcaattgccctgtcatatagtattttatcccatttttatctctctctcttcctcatgaagcttttagagcaataaaacagtataatatatgcaggaatattttttatgttataaagatatacacagatgtaacagaaggatatacaagatacgttcctaaaaatttcagaaatacaaacatctatgattgaatcaatgattccccggtattagcaaaattgtaatggagaaaaaatatagacaatgtatagggtaagatacataataataaattctcctgttttgagagccccctcctgcaactaaataggggttccagtaccaaagtagctggcaaccctgccctaagaggatatacagggagttggatgtgagtgtttacagtgtgcctctcacaggacattattttagctggtgggtgacctaatacctagttatttgacccatgaccagggggcttttcacacgggaaacttgtttgtactgacagtgcccttgtggctcttgtctgatccatgcccagcttatacctaccttaccatcactctggttccaggacctacagatgtccctaatttttcagatggaaggtataaattcagtacaccaccactatagaaaaaagcgcaatgacttttacttacatatcctgagcagggagggcacaaggagtccagagggtaattctccattcccaggtcacaggaagcaggaatggagggtcaggtggacagagagagaatattttggcagttagcagtatgcataaggaaataggatgtggggcactttaagttcacaaacaagtgcctggagtgtctgtttaaagaaaggggaaccagtcagctaggtgagaaaaatgctgctaagttcttatctctagccaccggcttgagccatttggatgtggtatagaactgaaaactatgtcagggatgactgagccctgcttctggcgttagaaagttaaacctgtgctcaaaatagaggccaagccaacataaaattataaaaatgcaccacatccctcaccaccactgcagaaaataaaaattcccagaatggtgtagatggacaaataagccaatatttattttaaatgtttaagctaagaaagatttgatacacataggtcattggagctaatccttgcagaatgtgcagctttaaacaaagatagataaaaatgacagccgatgaattccagccataaggcaagaatggaaatgaacatggaaatttacgaaggctacatggatcatactgaccagttcagtgtgagtgagaaatgagattcataagaggaaatagtgggatgataaagaacttggaatggtggtgagaagacaggccaggggtgaggtcatggaggtctttagttatattcagtagaaaatgcgtaatcatacaaattctcttccagcattttgaggcaaaagaaaacagggcaggggttagaatgttgtccaagaaaagaacaaaagaagaattatttgtgagagatgcaatttgcaatttaattgtccgaacttggtcagggataatatgtgtctgggcaaacagtgtctgagagaatgggaacactatttatctaaatggtgttgtaataccaatgagcggaatcgtattgctgataattttttatatcacacactttacacaaactatgttgaaacatttaaaaagagcttatttttagtttgaggagcaagtggaccagcaacctatcaactaaacatgtgcaacttgaactcaatagaggtcaaagtgaggaaggaatgcagattagtgaccaaagttatggacgtgatgtctgaaatcatgggagtgtctgaccattccaagataatatgctgtagaaagttgaaaagtagagctcccagttgtatttagttccaccaaaattaaaggaaaataattatatactttaaatagcatttattaattacagctgtatgtaaggtgctacgaatgtattaaagatagagggcttaaaacaaaagttactctcatgtaacataatcaaacaaaacgtagattagtaaaaggaatataatctatttttttcagccttgaattgtgttgggtatttgggatgatttctcataaatcacatgcagctaaatagcctttcaaaacaccttatctaaattcggtgtataaagaggaaaaggacttgttgaaactgacataggcaatgccaaaatatggattcatgtatctgtatgagccatttaagaacttatgctgtttttttttaacttcatgaaacaagacaggttaagcagtataatggtaaaggaaatgtctttatgattaagaagtcattagaaaccttggaggacctagttgtatagactgttagaagaggcagacataactctcagtgattaatgaattagcctgaggaagagaaagccaaaaatgacataatattctgagaaatataaccgaggaaatacagccaagaatatgatcttcagagaagtagcagaatcattggaagatcctttaagaataagggcaactaacacatctgcagacaaaatgaaaataggaaggaaataaatgatttggagagaatttcataattgatttaatatccctaagaatgaatacgggcatcaagtcaaggccctaatgcacgggacacatcaaatgatgaaaataatgagagaaaatatacaaacactgattatatggatacaacacagtgattagcaagcagaaacgctggtaaaattataacaacaggaaatggtgactccctttacaaatgtccttgaagcaaagattctcgacttgtgttacttcgctttcaaaagtcaaagaatcttttaaaaacatgggctgtttggatatttattttctcttacagctggaatttaattgttacggtgctaacactacactctgatccttacatcaactaaatgtatacccagacacacatctacactgcctatgtaaaataaaattataaaaatattaataatgtagacaaatgtataattgtatgtgtatgtaactttgttaggtatatgttacttttggaaaaagccaaagttaagtattaaaatacagtgagagtttaataaacatatggaatttaatttatactctttagcaatacagcaataaatctctccagtcatagtaattctcactgtttcaagaacataacatctaagttcagatatatgcatgtatgatctttaacttattctatactcagtgtctaggattctctagaaatttgacatacctctctagaatacctgttttatcctgaaagctgtctgcttcattaaaatttttcaaatatatattcatatgtatactactataagtatgtgtagacacacacatataattatgtgtatatatgtgttttatgcatacatgtatgtactttattctgataaaaacatatatctatcttaaatcaactgtaattttacttaacttttttagtggttaaatttttttttgaataatttcctgatcttagcttccttggggaagtgtatatgccctgagtatggaagagattcaaagtaaatagtagtttccatgggaacgaataaacttcacatcctgacataataaattagacctggtttgagtgtggcaaatcattttggctttctgaattcagcttctcatatgtaaaaaaagggtatgaacttttatcttataacctaatgcagctgacccgtgagtaacatgggggttggggcgccaactcgcatgcaggaaaaaatctgcatataacttttgactccaaagtcttaactactaatagctcactgtacactggaagccttaccgatagcataaaagtcaattaacacatatgttgtaggtgatatgtattatatactatattcttacaacgaagtaagtgagagaaaagaaaatgttattaagagcattataaggaagcaaaaatattcttactgttcattaagtggaaacagatcatcataaaggtcttcatcttcgtgtcttcaccttgaggaggctgaggactaggaggaagaagaaaggtttctcttgctgtctcacaggtggcagatgctagaaaggcggacaaggtagaagggtagacgtgtataagtagacttgtgcatttcaaacttgtgttgttcaagggccaactgtatgtaaaaaattctcacagaaatgcaacattattaataaaatatattgtaattacatcattgcatattgctatgtttatttcttcataattagggagcaagttctttctagatctttcagtatttttttgcccatgttaataactgaccatatgttagtaaaatcaagacatattgattttttccaagtcaataacattataatattaacataccaaaactgtaaatgatttagcgtttggatgtatacactaatcactcttatataaagataaaaataattttattggtccagtgtggtgactcacacctgtaatcccagcactttaggaggccgaggcgggtggatcacctgaggtcaagagttcgagaccagcctgaccaacatggtgaaaccccgtctctactaaaaacacacaaaaaattaggcataatggcaggcgcctgtaatcccagctactcaggaggctgaagcaggagaatcgcttgtacccaggaggcagaggttgcagttagccgagatctcgccattgcactccagcctgggcaggaagagcaaaactccatcttaataataataataataataataataataataataataataataatgtacaaagtatttggtgttaaaatatgattaaagctgtctaatattaaaatttgacatttgcatgctagttattgctacatatgaatgtgtggagatgccaaacttgtgatataaaatctatttcaaattacgcagagatacatctgagagatacgcagagatacatctgagagatacgcggagatacatctccgagtttgaaatcaccacacagtgttgcacaaatagtggaatgctgacaccaagtgcagaacaaactacctgagcatcacctcttatctttaaaatgtggagcataggccggcgctgtggcccaggcctgtaatcccaacattttgggaggccgaagcaggtgaagcgcgaggttaggagtttgagaccagcctggccaacatggtgaaactccttctctactcaaaatacaaaaattagctgggcgtactagtgcgtgtctgtcatcccagctacttgggaggctgaggcaggagaattgcttgaacctgggaggcagaggttgcagtgagccgagatcgcatccctgcgccactgcactccagcccgcgcgacagagcaagactccgtctcggaaaaaaaaaatgtggagcatagtaattttctttccacaaactgagctttaagtgaaatgttgactgtgaataatttagaatgcaaccttatatctagtatttcctcaataaatataagctcctttaaatttaaaatgttacttccttgagatgctaaaaactttgactcttctctttagaagagggaaaactgactcaaagcaaattttaatttattacttttcaaagttaaatattatatgttgcttttcccaaccaaattcttcttggccggaatcgtactatttttgtgaaaatggaggcatgaacatatctaatgtttaagcaacgaatctttaatatcttttttaaataaaattattccttaaatcatatcctaacaatgtccattaaaagtagaaaaggatctctttttactaaatagttagattgacccataagaagttatttctgaaggtcagaatggttgaatgtcacacttcatatagctcaacctaattagtgttcattctctaaattccaataacaagtaaatatgtcagataagtcaaaatgtgagttactgttttaactacgctgcttgcagataaaaaataaagccatgcttcttgaaaatgtttagtcccaaataaaattttgttatacaataaatagaagccttactttaacttgggaaggcggaggttgccgtgagccaagatggtgccactgcactccagcctgggcaacagagcaagactccgtctaaaaagaaaaaaagaaaagaagcatactatggatattcttgcatacttgtactgaggcatttaaataaaactgattgaattttaatttaattttaaaatacacacattttaagtgcaaataatcatttcaaggcttaaactcagggtactctcggttcccacctactctttctctaaaggatgttcttaaaacatgctagtgtcagagagaagataaaaggtacctatttaaggtgcctatttatggttcttgtgctagtattcaaccaggggtacttcattcaccctgtgtgtgtgtgttctctaccttggatgcgatgctcgaggtctctattctctgtagtcttttttcatacaccagacacctactcatatatcaattctctgaggacatgtttgaactatcggagttctggagcttcttgactgcttctgcttccccagattcgatgtgtttttctctggaccgcttgcctaaatattctcattatcgtctttctttttttggttgtgttttgttttttgttttgttttgttttagatagagtttcgctcttgtcgcccaggctggagtacaatggcgtgatctcggctcaccgcaacctccgcctccggagttcaaacaattctcctgcctcagcctaccgagtagctgggattacaggcatgcgccaccatgtctggctaattttgtatttttagtagagacggggtttctccatgttggtcaggctggtctcgacctccccacctcaggtgacccacccatctcggcctcccaaagtgctgggattacaggcacgagccaccgcgcccagcagtctttctttttcctaatccagagtttaagcaggacaggagtaggatgctggataccaaatgccgctaagacactgaacaatttcaaaggctatgctctggaagacaaggaacaagagcttctactgtgggatttacccaaagtttcctggatatttctgaaaacacccccatcacttaaaatgagagttttgatagaaatctgtgtgtgatcgtgtatgtgtttgcaggagggaatgatatggagcagtcaatacatttattcccccaactttattcctttgtccttttctgatctacccattaccaaaagtccttttaattcctatttctgtctagtgagaatctattactttcttctttattttagtttcacgactttatgaacttggcaaatggtggcagcggtaaaagtctattacttaggaagaaaactataggcaaatctttttttaaaaatcatatcctaacaatgtacatatttaataagcactagtaagtacttatatgagagaagtaaaaaatgatataagaatgtctaagatggttacttattctgaacttagcaaggtcaacagaatacaacaaatatatgttaagctaaaatcagaaaacagaaaagaaataaagaaacaaacctgaacacactactggaaaaatagtttagtttcctatgtaaaaagtgcaagagtgatctttttttcttatccaatgagttcagctgcctaaatttcattaataaaatttttaaataatttagaattatacatgaccaagtaaattagaaatatacatttcatgtttgttgaactttgcacaaaatagaatttatacaattccacttgaacatgtgcataattatctgttagttttttatagaaaaactaaatcagatgtctattgatttttaaactctcattttttctcaaagagcaagcagttgaatttaaacatccaatgacagcaaatttgatactgtatcattatgataacagcaaaaataatctcattgacagatattactgaaatttcatgtatatttaatttcattaccatatttcattggtcagcatattttaatggagttttgttagctttttcatattcatgtgtgagagcaagaaataggctaacatgctttaataagagtgcgtgtctttcaaaaattaatttttgaacattgttattggttaaattcaaagaggtagatgaaaatttagataaatatttcacttgacatcttactctatctctgtgtaacacagagttattttttactttacagcttgactgagcagttctctgattacttttctcttggtaagcctagacaattgctcttgacgcttgtctatgataaaaagaagtcataatgatttatagtatactgtttaaagttcaaaattacccctcttgtaaacctgggaaaaacatacttgctggtaccttatatctaacttgttggtgatataactaattagagatacggtttgactacatgactagggatataaaagtcgtaactggaaacgggtcaatctctcttaatcaggtttctttacatatgtactggtggttattttccagagacaaagagaatcctgaataaccaaagaaaggatcctggtgagctgttcctagaagatttgctgacacccagggcttatctgtgctttctttctctggccgtactgtatacgttgcctcaacaatgtccttcataagcatgctctgtgaagtctaatgagccatttcattacccacctatccaatgctgctaccagatatatgcacattgtacagcttcttcttaattctgttggtagtcacctgtgcaatcttgacaatatgctcatacctcagtttctcaaacaaacaatagccagtaaaattgctttattgaacttgccttacttaatatacctcccctttaccaaatattttatatatttttgttagtttcatgtttctcaatccattaattttagataatatctcattaccactatgtaggaaaagaaaatatattcttcaaccctctctcatctctttctaaatagtttcatcttccaacttccaggaactataatttgattttccaattctataacatgtttagaaactatacgtttctataagtttctgtcagtttcaaaacttgtgttaggttttcaaagtctacaacatatttagaaaatataagttttgatgagttgtgtgaggataatttttttatttttcattttttgtctactaacagggaggcagctactctgtacctctttaggatgtttgatataatagggcccatcttttgattttaaactataaaatctcagctcttctcaccctgggaattgtgaatacatacctctaaaattaacttgaaaatctctcaggaagtgtacaagaaactatctcgaagtagaactaattgttctcagggagataggaaaattttacattagtgtataattttgtgtgaaattttatccagactgttttatctttctcagtactcgcatttgtataatctgattcatactcaataatacattggctctttccttccttaagagtatggaggtctctttgtgtggtaggattttttatttctttcattgttgcctttttgttggttctaataattaaactccaatgtagattgcttgcaaatttatgattgtataattttgtccaccaagaagattgataggaaaggatggatgatttatactgaagtcatgaaacttgtcttatttgaataagaatgttagacaccaatgtaaaatggtatcgttttacatagcacagaattaatttcaaaaatgtatgtcacaaattatatcataattaaaacatgatttcttttaatagattgttttacctagagtaggcaatagactttttgcacttttatacaccaagcaccttatgccatattacatgttaaaatgaatcttacttatacttggatgcatccatctcagtgccctgaatttcttttcaaatacaaattggttgctttttaggcctgctacatgttgcagaatgttggattccacaaataacaacacaacctgtttctaagagaaagctgaccaaggtaaaggacagcaatgtttctatgaagcttgggcaatgtcttgaagtagggaggagacattagaatttattgagaattggagattttgtttaaggcaagaatttcaatgttgatgggcttaatattaggttaagaataatgcacgatacagtagtcttagattagtgaaaaacaggatgaagattttgaagcagagaattcaatgaatcttaagtcacaccctgttaatttttattgaattgaagagctgtgggtcttcaggaagtttcataatgaacaattaaacaatttgcctggactacaaacacttgggaaagtacagtaatgtgaatgaagacagtggaatagcaaaatcatgttattgtagtgttatgggctgaaatatgtccctccaaaatttatatattgaaattctaaccaccagtattttagaatgtgactatatttgaacataggttctttaaagaggtaattagggtaaaataaagtcatgtgtgtgggcctgaaaacaatctcactggtgttcttataagagggagaaatttggacatggatatgcatatgcacaaaggaacaaccacactaaggccaagggagaagacagtcatctacgaatcaaggagagaagccacaaaatgaaactaatcatgccagcaccttgatttcagtcttccagcttcaagaatttctgagtaaatattgaccttgcctccccactttgagtttctcttgtttaagccattcaatctacggtattttttatagcagccctagcaaattagcatatgcagttaaattatggataggtagttttggtccccccatattcaggctaaatgtggaggtgggcattttgattcaaaacatatattttctttttagtgtactcctgattttagttcacagtgtatgcatacctatgtattagtttaaatttttatgttggtaatatataaccataaatatatttttcaaatatttttatatatttgcttaatgtttagtttttttctgaccttatatttgattggcattttacggagtatcaaatctatgttctattttacttcctcttaaatattattcaattgttttctagcgctttgttattgaaaaaattgttactttaatacaaactatatataatatatacacatttttttctgtcttgcattctaaaaatctttaaagaatgattattaatacctaatgattattagttatctacataattatagacattgtttatcttcatgttagtcaactcaggctgctattttatttttttatatttatttatttatttattttaatttatttttctgagatggagtctcgctctgtcgcccaggctagagtgcagtggcctgatcttggctcactttaacctctgcctcacagattcaagcaattctctgcctcagcctcctgagtagctgggattacaagcacctgccagcacgcctagccaatttttatatttttagtagagacagggtttcactatcttgggcaggctgatcttgaactcctgacctctggatccaccctcctcagcctcccaaagtgctgggattacaggcatgagccaccacgccccagcctcaggctgctattttaaaaactagcacaaaccaggtggcttatgaagaaaagatgtttatttctaacagtcctggaggctgggaagaccaagatttgggtatccacagattcagggtctgatgaggacctgtttcttgattcatggatgacctttttttttttctctatgtccttacatgaaaggaaggggcaaaggagttctctggggttccttttataagggctcttatcccatttgtaagagttgtcctcatgacctaatcacttctcaaaggccttacctcctagagtcatctcactgggggttaagatttcagtatgtgaattccagggggacacaaacattcagtgtataatattgttcctaattgtggctacacactaaagtcaggcatcagagcagcttttaatagatagcagggccagatgccagaccaactagataagattctatgaaggagcggcctctcaacctcattctaagtattctctaaatgattacagcattattgggaatatacatacattcctcttcatataggaacgccatgtttacaatcttgactactagaatcaacttaaaattagtaaagtgcagatgataggtttatttttgcccagttaaaattatgctaggaattcttgtgttttctaggcagataattccgttttttagatccctattctagaagtcagtgttgaagtgccaataattctacacaagtgggagaagttattaataaaagctaatgtagcaggatgagccgcagatggttaaagaaggaagaggctttattcagccgggagcatcggccaacttgtgtctcaagaaccaagctctccgaagaaagagttcctggcccttttaaaggcttacaaccctaagaagcctacttgaaagggtcgtgatagattgagcaagcagggggtacatgactatgtccacatacgttagtggtgggggtaagcaatgcaagtatttctgcataccattgtctgtgatctatagatagcacaagtgattagggtgggggttatctttaacctacaggtctggccaatggcaccgatcagtctgttgtttttcagcttttacttccttcttctcttccgagacaggggacagtaagagaaatagcctctttcctcagtaacaaagaataattagcaaaaatttcaacagttgacataaccttctgctaatactctgctaatgccatcctctgctattcaactccacgtgtacttcctctctattcccagctttgagcttctcgaggctgctactggggagaaccgtgcttctgcaaccgtttcctatgtatatattggaccatgactcccttcacttgagagaagagagagactctctcatattgttttatattgttttatattcagtaaaaacaacaaggaagtaaaaccaaagacaggcagcccggcgccaggcccaaaaccaggcttgggcctgcctgacctaaacccagtagttaaaaatcaacctatgatttagaagccaatattattcatcgattccagacattatatagaagaacactgtgaaactccctgccctgttctgttcctccctgaccaccggtgcatgcagcccctgtcaggtaccccttgcttgctcaaatcaatcacgaccctttcatgtgaaatctttagtgttgtgagcccttaaaagggacagaaattgtgcacttggggagctcggattttgacacagtagctggccgatgctcccagctgaataaagcccttccttctacaactcggtgtctgagaggttttgtctgcggctcgtcctgctacacactacctttgatggagccctaacttgccatctgcctctgatttcccaaacatgtgttaaaatctctgtgccaccaattattttctttcttgctatctctgcatattatgttacatttttttccttaaggagtcatcagagggaaaaaagagaaatatatttgatatataacagatattaatgtcgtttacattatgccccttttcaattgtctcagagcacaaggctgtagataaaagctgttaggatagaataaaataaaaccatacttacattgtgtttacggaaatatctataaatagaaataactgtttatatgcttgtttttgaaatttagtattgacttttttttaattaaaaatgaaaaaaaaattcaaacattttaatctattggcctccaaagtacaactttggtgtttttcctgttccatttattttaataaaaattaccatataactgggttgaaatcactctaattgtcaccatatttttactgttgagggatttcttttcctgcgattttgtcttctatctgttcatgaataattttcaaaaacggagctctcatatttaggcagctttcttgcagtgcaacacctcatcgcctgcactgcaggataccccagatgcatgcctcgcacatcacattgggtatatcaaagacagaatgtttacatttatctcaaatgcctcaatattctgttttaggtcattctgtttagggtcattaggaaaatctgcaaaattgctgtatctgggattttattaaattaagacatctcttttaatcttagttttttaaggagtatataaattttgttggaactaaacttgggacataaaatttccatgggaaaaatatgactaggaaaaccatggggcttcagaagaaaaataggttgttacattttgaggacaaaataatacagaactatgtttaattatatatggcttaaatatgctttcaaaatgttaacttctgatgtatcacaaaaaagttgaaataagcatttgagttgctggggacatcgtcacctttccagtgagatcacctttctggcctctaaggacagaagcagaagctgttattccaatgtttaatcactagaacatatattgagatgacacttgtgtggcacttctatgatttaacagcagtaaagttagtaatgtcagtgaaaacggtggaatagctcaaagaagcagacccctcacagaaatattccaacttcaaagaaaacctgttagaaacaactttgtcagaattctaggaaacagtgacaggctcatagcaacaaagcaaatgctgaattaagaaaaagacaatgtaaaaatgatagaaatgctttgacattttcacttgtccttgccacactcccccactcagctcaggggtaatcttgaagatggcagccttcatttctagtggaatccctggttccagaggaggcaaagaattgcatttgcctgctctaaattgcctgggggcttcccaaagtgttgacacaaggaacttgtctttgtttagcataactgggaactgggtctgaaaatctatagaattgactaataaacattgtaaggcaagtgcaaaacccacagccgcctggggcaaaagattacaacggaagcaacaatagagtcccaaaagcctaggagggaaaactggggagagagtttcactgggaaattagggcatccaaaagtttctgagtctacttggaatttagaaaatcacatgcatgcccagggtaagactcatgctaagaaaagacctgtgaatatgcaacattttcccctttggctaaactccatgcaagtgcaaacaggatgtacaggctaaggcagagttttaaatggcccggctgagcattgaaggatttcctcatcacaaagccagactgcaaagattggggaaggtttttgatttacgctttcttatcttctctctgtctgtgtctctctccgtctacccctgacattcaaggaaataactgccaaaactctagctagacaaaaattaaaggaaaagctacgtcagcgaccaaatattacaaaaattacaggtctacagtttaacaacaaaaagaagaccaaattaagtgggcaaagggtatagacatttccccaaagaattatacaaagaaccaagaagcagaaagcccttgaaatgatgctcaatatcatttgtcattaaggaaatgcaaatcaaaaccacaattgagataccacttctcaccaactaggatggcttttttaaaaatttaacttatattttaagttcagcggtacaattgcaggtttgttatataggtaaacttgtgtcgtggtaacttgttatataggtaaacttgtgtttgttgtatagattattttatcacccagctatcacacctagtgctcattaattatttttcctgatcttcttcctcctcctaccctctgtcaggcctctgagcagaagctaagccatcataacccctgtgacctgcatgtatacatccagacggcctggagcaatggaagaacaacaaaagatgacattccatcatttgatttgttcctgccccaccccaactaatcaatcgaccttgtgacattcctcccctggacaatgagtcccatgatctccccaccctgcaccttgtgacccctgcccctgcccgcaagagataaccaactttaactgtaattttccattacctacccaaatcctataaaactgccccactcctatctccctttgctgaatcctttctccgactcagcccacttgcacccaagtgaataaacagccttgttgctcacacgaagcctgttggtggactctcttcacatggatgtgcgtgacaccctctaccctccaataggccccaatgtgtgttattcccctctatgtgtccatgtgttcttattatttagctcccacttacaagtgagagcatgcagtatttggttttctgtttctgcatcagtttgctaaggataatggcctccagctccatccatgttcccgaaatgatcttgttctttttaatgcctgtatagtattccacagtgtatatgtacaaaattttatttatccagtctaccactgatggacatttaggttgattccatgtctttgctattgtgaatagtgctgcaatgaacatacatgtacatgtgtctgggaaggagggaaggaaggacggaaggagggaaggaaggaaggaaggaaggaaggaaggaaggaaggaaggaaggaaggacaagtgttggcagtaaatatgtagagaaatgagaatacttatacattgtaggaatataaaataattcagctgctatgaaaaagagtttgggagcacctcaaaacataaacatagaattatcatatgatcttctaattctatttctggaggtacaccctccagtgttgaaaaactagtactcaaacaagtcagtgtacataaacattaatagcaggactattcacaatagccaaggtggaaataaccaaatgttcacaaacagataaatagatatcaaattatggtgtgtatttatatatatacacacacacacacacacacacacacacatacacaatggaatattactgagccatataaaaatggagtaaagctatagtgtgaatattggtgtctgaggccattttatgttgcttataatacctgaatctggttaatttataaagagaaggaatgtatttcctacaattatggagactgagaagttcaaggttaaggaggtgcacttggcgagagccttcttgctgatgaggactctctgaagagtcctgaagcctcacagggtaagatagggcaaggaggatgcgcatgctactcagatatctcttgctcttaccataaagccaccagtccctccaccaatgatagcccattaattctttaactcattaatccatgaatggtatctgccctcatgatccaatcacccattaaaggtcccatctttcaacactgccacattggggattaaatttcaacatgaattttggaggggacagatattcaaaccatagcagttggtgcccccaccactatctaatttacgtgttagaacctaacacccaatgtgataaacccaatgtgatagcattgagttggggcctctgagaataagtaagtcataaggactctgcttagtgcccttataaaggaagcttaagtgagctgccttgcaagttccatcatgcaagaatgcagcaagaagccttcctctttgaagcacaggcacaagcctcaccagatattgaatttgttggtggcttcatcttggactccccaaactcaacaactataagcaataaatttctgttgtttacaaattctctagtctaagatattttgttagagcagctagaacaaaccaagacaagtactgacacaataataaggatgaatctgaaaaaaaaaaaaattatacctagtcaaagaagccagacacaaaatgtcacagattgtatgatttcatgtatgaaatatccataataggtaaatccagagagacagacagaaagcagattggtaattgacagaggctggaggatgagagaatgaggagtaactgcttgataggtacaaaattttcttaggggataatatattttggagcttaatagaggtgggcatatataagattgtaagtgtactgaatgccactgattttttcactttaaaatggatcttaaaatggttaatcttatgttacatgaatttcacctaaactaaaacaaaaaagtaaaagctacaaacttcttgctgtcctcaaaaacaatgatacccaatttatatatgaaaatctcccaatgaccagaggtggtttatgttactttgaaattgacataaactgaaagatgtaaatattatttgtaaatttcagtggccctgaaaactttctgtaacgagttaagaaataacagtatgtactaataaattaattaatatttccttaaaatcgtaagtttctttgactaaatcatatgactcttacttggaaagagttagaggcattgttgtgaatcttaccagaatatgccaccccaacatagaccttttgccctgtgaattattttgagctaggactcctgagaaccagcagactcaggaaaagctctaaaaacagggcactaattttccctttgtaaaggaaatttccatttgtaaaggtctctccttctccagaaagaggtggaaagttctcaggaccttttaagagtgtgccttgggccttgatcactcacatatgactcagaataaacctctttaaatattttacagaatttgactctttgtcaacaatatcagaataggttaaatatccaaaatttctgcaaattgaaataccaatttcaaactttttttcacaaaaacacaaattgtcattaaatttggtggctgttcatactcacgggaataatctgaacataacacattttcctgcattggccatttacccagaaggcctacatttttttccatctctctcttcaacttatttttcttagcagaaattttgatgtcttagaatctaccaggattcttacagttagatagtaaataatttcattcaaattaattagagatttaaaatgaagttgctgaataaatatttgagaatatttaatcaataatatactatttttaaaccattcttctttgctttttctctctccctctctcctctctttgaaagtcatttaactattacctgttgaaagccctgcaggtgactcagtattaccctcattattcatggtaacaggagcaagaaaactaaaggagcttttgttcctaggcagtcaaaacaagataggccaacaatagttacaaagctatgaattcagtactaatcagagatttggagggtttttgtgaacctgctattcttcagaaacccttaattctttcagtttctcctttcgcatacattctgtgtcttctgtcaaatgaaatgtagcatctctgtacacagaaagtttctgagctaagtatatgtaacacgagtttcctttccaagattcaacacctatgcattgcaatcaaatctcttttatactgcattgtataagcacataaaggcatcagtttaataaattaatttttattgagcctctgttagtaaaaaattatgcaattcaatggtatagtgcattaaaaatatatgaagtggttttatactcttttctgtgcaaaggtgttgaaaaagtaactatccaaggttaattaccgtcagtagtaggagaatattttgttaagtaaatttagtaggacaatattttgttaagtaaaactaaattatgtttataccttgctgtgatcttattttataatgttaaagttaaaggttaccttacaaaacataattaccaacttgcaaaagtattttaagggtccgttattactttgcatcattgaataaagtgtttaaaaattgtgtgatagtgaacaaaatgtacttagactatattagtagatcaataataataataattacactgtttttgccaggcccagcatttgagagaaaactatgcataagcaaaggtatagatggtagaagggaatacaggatagaaaaaacacatttaaaatgcttctaataattttccaattttaaaaagtgtctaaaatctctctccatttctttatctttttgaaaaattttgatgactaggaagttgctgtttcatctaaaatatgataaaacctctgaaaactaactccagtcaatgtgaaatttggcagggcctattatctctgagctacttcttggattaacctctgtagtgtaatggagactgttaagactcctgggagtgacaacaaccacagtgacaggagaacacctggttattggcatttcatcctttataatagatgcccaaacaggtccccagacacctgcagaaattactagggtgtgttagaccatgacagttgataaattattaccagacacaatctggaaatgggcttctaagctttactatcatctctgaaggaaaaaatatgatttgcctactgggaggaaaactcagctaaatattctaaatgaaaaatcaaaatatatgcataagataagctagcattcaatagctcttagcaaaatttgacgacaaaataatgtttagaaaatgttcaaaaataacaagggtataatataattaatgtatatcaaaaaatgacaattttttggagacttacagtttttatgcacaaggacacagtactgctaacagtaactatataaaattttaaacagaaaataaaaacaatggtagaatattagcatcggtgccaattctacattttaattatgtatagtgcaaaatatgttagacttccatatattcatgctaacctagttgatgctaatctagatctaacctagttcatgctaacctagatgatcttcccaatgttgtagaggaaaatttagtgacaataaagcttactgagtgtccactctggatacctactcaaatatttcctaatatgggtatgtaatgcatatgcatgaaaattctttcctccctactcttgcactcacacttaacacagaactcttccataaccaaatgtgtgttgtttgttttttccctcacaacaatttaattctcgaattctctgcagaccccagttgggtgccctgcaactgaatgaattctgatgttcactgtaattagcacaaatcccacaggttaagggctcagtcgcacaaactgtccacacatccgaagccaaccgtaagtcccaggtttttacttgtacttctgactttctggctataaattgggatttccatgacccctttcctcaagttcagtcattttccaaaagggttcacatgactcagggaaacattttacctatattactagtttattatatattaaaggatatgatagaggttacaggtgaacagccagatgaagagaggggcatcgggtgaggtccagaagtttcttgagtgcaaaagcttttctcaccacaaagttgaggggtgccacactccccatatgtggataagttcacgaaactaggagatcttcaaaccccatagtttagggatttttttaatggaggcttcttcacgtacactcaatctccagcccctctttccttcccagaggatgagaaatagggctgaacattccaaacttctaatcatgacttggcccctctgatgaccagctccaatgcaggagcccaccatgagttgccctattagaagaagagatgctcttatcacctagagaatttataaacactaggagctctgtgcaaggaacggggctcaaagatcaaatattagtaaaaatgacacatttagtacccccattgctcaggacattataaggtttttagaagctttgtgacagaaactaggggcagagaccaaatatttttaaattatgtctcatatctatatctatatctatgtcttacacccaaatagacattggtgtcacaaactatcatatctctaatctatttatatttttaaaaattatttattgtcccacaagcggcctttctccctgtctttttctctattaaaatggtgtataagctactcttttgggtattcacctcctcttgtcatgctcccatgcatacaaaattaaaaattatacgtttgtatgccttttctcctgtcagtctgtctcttgtcactttatttttcagatccagcaggagaacagaagaggtacagagggaaagtttttctctcctacagggccaatacaatatgctattgttaaaattgtaaactgaagcataataatattttaaagtgcttatttgaacaaacaacaatttatgaatccagcagctccagaacagaagtggttcagggattccctggaggaagcataaggtataggcttttctagagtgaatatgaaagtagtataaagaaagggatatggtttggctgtgtccccacccacatctcatattgaattgtgatttccataatctccacgtgtcatgtgagggacccagtgggagatcatttaatcatgggggtgggtttttcatgtgctgttcttgtgagagtgaataagtttcatgagatctgatggttttgtaaagaacagttcccttgcacattctctcttgcctgccaccatgtaagacatgcctttgctctttctttgacttctgccatgattttgaggccttcccagccatacggaactgtaagtccattaaacctctttttctttataaattacccaggctcaggtatttcttcatagcagtatgaaaagggactaatacagaaagtgtatttgattagttacagttataagttttcttatttggtctatcctgctggaaatatctagtcatatatttagaagtttgctggctgcctctgatttactgaacttaggtgtttatatatatatatataaaccaattaggcctgataagtgaccttaaccttgctggatttgaaaacataagcaaaacttaacttgagttatttcttgtaaatgtctatatatatatagacatttgtttatatatatatataaaaatgtctatatatatatatatagacatttacaagaaataactcaagttaagttttgcttatgttttcaaatccagcaaggttaaggtcacttatcaggcctaattggttttgtttgctctcagggattactcaggcctggtctccattttaatttactaatactatctcaagctagatctagagcagtggttctcaaagcatagtccaaaggcttccacaaaaaagccatacaatgtttagaatcccaaatatttttgaccccagtttatagcaatagagaatgaagactttgaattggcatccttaggaaaatatacacatggttaaacaagttttggtaatgttccggtaaagatatattaaggatattgcttttccgctcaaatccattgttacagatgtcctcaagggacatctattacactgaaagagagggacctggctagtagacaaaggccatatatgtttagacttaaaaattatgttaagtatagaataagtgttgctccttaaacttggaatttataataagccagctgataattatctgattaggttgatgaaagagttggattgccaaaaaagccacaagtctacactttgaaagtctgtgactggtaaatctgcaaattaagacttgaacctttaaaaatatcgattttattttatggtttataatcttttgccagtaatttggaaagtataatgaaatcttcaatttcctaaagaaatataatttatcaaaatttactcaggtagtaatagaaaatctaaaatcatctaaaataattaaataaaattaatcaacattaaatatttacctcccctcctcaaattccacatgcaaacaaaactatctgggcctagatgggttagcatattatctaaaacaaatacttagatattttcaaactaacatacattctgccagtgagaaaattttccttcaatttatttgagttataatcataatatgaaaaatagaaggagggtgaaaaaggaacacagaaaataatgtaattttttttctttttttttgagatggagtctcgctctgttgccaaggctggagtgtagtggtacaatcttggctcactgcaagctccgcctcccaggttcacgccattctcctgcctcagcctcccgagtagctgggactacaggcgcccgccaccacgcctggctattttttttgtatttttagtagagacagcgtttcaccgtgttagccaggatgatcttgatctcctgacctcatgatccacccaccttggcctcccaaagtgctgggattacaggagtgagccaccgcacctggccaataatacaaatattttaagtaaattttatcacgtcaaacctagtgttgtatataaaaaaatacacaaataagtttacttcagaatagaaaagcaaagatatcattggaaatttcttaatatattatacataattagatttaaggtttaggctttgagaaatatatttgataatattcaatattctcccataataaaatttcttgtcactctagcactaggaagaaattttattagcctgctaaatgttgtgcaccagagaaaatatagctagaatcataaaggtaaaaagccagaaattttcattaaaaaatcagaaaaaaacaagcaattccactgtcaagtttataaactgcagtttctattgcacacgtacacagagtatgttaaaatatttatagtagaatctcttataagagtaaaccattggataagacatgtctgccaaaacattaactgacaatagactccccttccctcaaaagtatatacattcattccttatattaccatacaagattcttataaacataacattgagtcaaacaatttaagcttcagacagatacctacaatttaaactcataaaaaactagcatatgtggtgttaatgatgaatacatatgtagtaaaaataccccaaaactgcataagaataatcaaaactaaatacagtagttacttacctctggggaaggaagggtaaagtaaatacacccaggatgtggagggtggtacctataccctactcagcaaattttattttttaagttgtattgttggttcataattaattattatgccattctttactgtttcctgtattttataaatatttagtaattcactcttaaaaatgaagagtgaacagttttgatagtttttagttctgtgatgttatttcaaaaaactacatatacatacatgtagatttatggtaataaaatgcacaaatctacacgtatgtgtatgtttatggtaataaaatgcacaaagctacatgtgtgtatatgtatgtgcatgtgtatgtatatgtgtgtatatagatacagatattccacagaggtagtacacagaaactgaaagtggtccacaaatgacaaaaattgttaaaaaggtatagaagaaatacattatatggaaaaatgaataaatgtttttgagattacgtatggacaaaaagctaaagagcatatgctataaatatatacaaaagtttaacatgtaacttgtatgctaagaattcatttggttatttccagatcatttacaaaactttgaagaacagaactgttgctatggagattttgtttaatagtcatcaaactaaaggctacaaaagctaaaaatgcattcataagaacataatgctcatgtttatattttgaagatctatagcgtgaagcacatgttcaggtattgccaaattttgaagcaaagtttctaatcctacttaacttaaaattattctgctattattttagattaatttatattttactcctattgatctgtatttatattgacaagagatcaaacattatataccatcattgtgggtagtagctggggaaaaagtcctcatgaattatctgcaagtcttaggaagaacacattctgaatcctgcagttttgttcagagctatctcagaggtccctgcatataaaaaggaattttcagagcaacaatttggtttttttcttcctaacaatttggcttgggttcataacttgcttatagggattcacagattttttagcatccaaatttgcaaaattaccacatttcatacatattgcccacctaagaaagtctgttcctcttcaatctggcttgctcatctgtgatctgacagatggattctacccacaggcaaaagaaaaccttattttaaaaataaaaattaattacatcaaacttaaaatctcacatcgagttagaaagaatttttattaaataaaattgtagtggagtactggcagcattgttttatatccattttcatctgtacacaaagtatttttttttaattggtgaggtctagctagtgcaggtattatttatctaaatttggtagcgcagtcagattgcaacagaatgatgtggcgacattgtgatttcttataaatgtctatcttttccctcttcccggctaataagatgcaatgctcttgtttgaagaaaccaagatcccagccacaaacaagagatagttattgaactaatccaaaagttagaatcctcctccaattttcctcttgtagctaatggtaactgttgtaacactgctctagccaatggggaaaatctatcgggttgtgggactacaggaaaaacttctgagtttctaatgaaagggacagataaacctgtcaactccccttctaacttttttcctactgtgattggaaatatcatgactagaactggggcaactattttgctactgtaatttacatgcatggaagttaaaatttaacattcttaggatggtagaagagaaatatagaagaatcttgtaccctcaatggcatgactgagcggttaagcaaatgctagcaacagcctagtgtcaatttaccttgtccctttgattgatagggaaccacatatgttatctgtttcttcttaaggtagcatctgaggttgtttttaaagtgttatgcctgctttatccaagttatgaggtttatgagcataaagatcttgtgatgttttcttattattattttagtgtttgtaggctcaaaatgatgcccctctcttatgtcccatcttggtaatttgtatctattgttcatgtttattatagctggatggtcatcaattttactgacatgtcaaagcagttttgatattattgaccttttctactgtttttcccttttcgatctcattgatttctgcttttatttctatattttctcctaatgctgtgttgcttgcttttagtttaatttgctcttttttctgctttttttaaaggcagatattcagatcattggcttgagacatctattgtctatatttattttctatatttctatactctattttctaatttgtctttactgctttggctgaatcccacgaaatgtgaatgtaaatgtcaattttgtcaaattgcttgataatgttctccaagttttccatatatttactcattttctgtctacttgttacatcaattgcagaagagtgttaaattctccacaaattctcattgtggaacattaatattcttacacagctctaaaatgctttttgtaacttttttttttattttgtttcagtttgggtaatttatatttgtatggcttcaagggcattgattatgtctttagctccatcaagtctactgatgacacctgctgtgggtttagttgtgccctaaaaaaagataagttgaagttcttaaacctagtacttcagaatgtggccttctttgaaaatatatctttacagaggtaactgagttaaaacaaggttattggggtggaccctactccaatgtggcttgtttccttatataaaatggaaatttgaatgcagaggcagacatgcagagagagaggatgatgtgaagacatagaaggccatgtgaagatcggcaattggagtgatacatctatgagccagggaatgcctgaagctactagaagttaggatgcatggggtacatccttccctagtgccttcagagtgaacgtaaccctgatgacatcttggtttcatacttttagtatgcagaatttttttttttttttttctttttagatggagagatggagtctcgctctgtcacccaggctggagtgtagtgacacaatctcgtgtcactgcaacctctgcctcctgggttcaagctattctcctgtctcagcctcatgagtagctgaaattacaggcatgcaccaccacgtcccgctaatttttgcatttttagtagagatggggtttcaccatgttggccagactggtctcagactcctgacctcaagtaatccacctgcctcagtctcctaaagttctgggattacaggcgtgagccaacatacccagcctagcacagaattctgaaacaatgtttctgttattttaagctccccagtttctggtactttgtatggaagccctaggaactagtacaactctaaaggttttcatttctcttcgtgttttttatttatatcatttgcgttttattcttgatatatttttcatttctctactgaatttttctatctggtcatgcatgttgatttttttactagattatgtaacacattaaccatagttatttaaatttcatgtttaatgtttccaaaaattgtgtaatcttgcaatctggttctgttagttactttgcctcttagcattaggctctattctcttgcttttttatctgtcttctattttacattgaataccaaccctcatatgaagaacattagaaattgaagtagacagtatttacgattaaaaatgaaactgccttttattctacaacgctaatatgtgtgacagtatgccaatctaggaagcaattgactgggtttggatttattgttatgaaagttgccttgaagtttaccaaggttactatgccattggccttgagttcctttagtgccacatcttaactaccttagatgagctgtccttggatttcaggctacttgtctgacctgtgacatcagcattcggatggacttgaggaaggctattagtttccagttaattgggctttttttggtcattgaagaaataatcgttttattagatttctcccttaggtcttctcaggtctccaaatggtagagatattttagagaaaagtggaactcttcttgctatgtgagaagagaaaaataatcacctacatgattaagcacttttagctgtactttttgtaacttgaaatcaaacacgttagtagctaaaatatctgtttttgtcccaggttttgtaacacacaaagtcacacaacaactcacacacatactgtggaaaatgcatgtgtgcgtttgtgtgtatattatattatatattatatataaaatatataaatatgtattatattacatattatatacaaaacatataaatatatattacatattatataacatatataaatatatattacacattatatataacatatataaatatattacttattatatatattatatataatataatatatataatatataatatatttatatatgttatacataatatatattatatattatataatatataacatattatataatattttatatataatgtattatataatattttatataatatattatatataaaatattatataatacattatatattatatgtaaaatattatataatacattatatattatatgtaaaatattatataatacattatatattcttatatatatattatatatatatataaaatatataatataaatatttaatataaaatatataatgtatattatatgtaaaatataaaatatataatatatattatacattatatgtaaaatatataatatatgtaaaatatataaatatatattatattaaatattatatgtaaaatatataagtatataatatatcatatattatatgtaaaatatataaatatatattatattatatattatgtgtaaaatatataaatatctgttatattatatattatatgtaaaatatataaatatattttatatatttgtatatttatatttataaataaatatatctttatatttgtaatatataaaattatatataattataatatataaaatatataaaatatatttaaaaattatatatttatattcataaataaatataaaatatattatatatattacataatatatataaaatatattatatatattatataatatatataaaatatattatatattatataatatatataaaatatattatatattatataatatatataaaatatattatatatattttatataatatatataaatatatagtatattatatatcatatattatataaaatatatttatataatatatgatataatataaatttatatatcaatatatatcttatatattatatattatatattttatattttatatgtattatataatatataaatatttacagtatatattatattaatgtaattatataaaaaatattcacattatatattatattatatattaacatataaaaatatatactgtattatatattaacatacaataatatatactgtattatatattaatatataataacatatactgtgtttatattaatatataataatatatactgtgtttatattaatatataataatatatattgtattatatattaatatgtaataatatatactgtattatatattaatatgtaataatatattactatatatggtattatatattaatatataataatatattactatatatgatattacatattaatatataataatatactaatatataatatataaatatttatataatactaaaatatattatatattatattttatatgtaatatatattttatatataatatataatttgtatgtataatatatatttatatatatatatatagtgagagagagagaagtatacctagatatgcaatgcttcagatttgcttaaactgtatgttctctagtatttatattaagtcatatattggaaagtgtaaaatattccaacatttcaattcaaaactttcaaaaaatgtactatctgctgcaggaaagttaccatttaaacattttgtggggcaaaactttctcatacataacccctatcctgaaaaagtttataaaatggaaggaaaaaaaaaaaccatgtagagaaagtttaaattgttcaaaattattttattacttttctatcatatgttgattaaatatagaaaataatatattatatgctatatccaaataagataatgtggtttgtttattgcagcactattcacagcggtcaagattgggaagcaacctaagtgtccatcaacagacaaatggataaagaaaatgtgatacctatacacagtggaataccattcagccataaaaaagaatgagatcctgtcatttgcaaatgtgggtggaactggaggtcactatattaaacgaaatgaaacaggcccagagaaacaaacttcacatgttttcttttatttgtgattgctaaaaactgaaacaaaggaacctatgagttttatagattccctatctaaagataaagagtagaatcaaccttcccaggaaacataatcaggctttggcaggggagtggggactggttaaatgggtataaaaatatagttagctagaatatatacaatctagtatttgatagtgcaacagggtaactataatcaacaatagtttattatacattgaaaaataactaagagtctaattgcattgtttgtaacacgcagtaagggtaaatgcttgaggtgatggagaacccatttaccttgatgtgattattgttcgtggtgtgcctgtatcaaaatatctcatgtactccataaataaatatacctactatgtactcacaaaaataaacattcaaaattttaaaaaattgacattttatttgagcatttctatataaatgtttaaagtattataagcatgaataaatatttacacagataaattaaattgtagtgagtttcctttcggccttaaaccttacactccaataccagagtagaaattttcaaatttatttaatttgaagatgctatttagcgacatagcaagtggatatgtctgtattttctgagttcctgcctgtcgtagtgtgctcaagctggccataacaaaatatcaccgactggggtggcttaacaacagaaatgtatttcctctcggttctggagtctggaagttcaagagcaggatgccagcatagttgatttctggtggaggctctctttttgctgtgtcctcacatggtagagagaggaatctctctggtatttctctttataggggcattaatcccgttatgatagctccagccttatgacctgatctaacccttataacttcccaagagccccatcttcagataccatcacaaagtgtgtcacagcttcaacagataacatttgagggatcacaaacattcagtctctaccactgcctaatagtttaaataaaactagttaggattaatggaaataatagtgtaacctttgaagtgccatctgattccattttagtattactacttagtcattaatggatgcagaacacacacataccacacacacaaacacacatgcacacacacacacacacatatgtctgtatattagcttacaagcattattcatagagtagacttttctataggtcatcaagaagattggaactgtccatattttaaacctatcctgggaaatttattttatcacagtgatgtcctgcccagtgtttccacagaagaattaccaactacactgagagaagcatctcaaaacaaaggtgtctcttttttttttattgttagtgttgctatgcttttttgtttactttcttccatcttttgctatgttttatagagcatgctattatttccacaaaggagaactatatttagaagtaatattagcaaattgtcttagtgtgttaaaaattgaattttattgattaaataatactgagaagtatactttttctcctttcaggctaaaaagaatataaaatataaaaccaacaatattgtagctatcagttggttattcctgctttcagcaaatccattttactttttaagtttttgataatatcaaaaataattgactaaaaaaattaaatgagagtgaagaaaagttttaggaagacaattaaaagaaaattaaaaactgaaagaaaagactcaggctcaactacttcctaaaataataccagcatttctcatctaaacttccatttgtttcttttcaagtcacatgtgaaagctaggaaaggggcaattaatgtatcgtgactgaagactttgcaagttcaagtatacaaaacaaaccaattactgtagattgaactttgtagaatacacacaatcccagcacttcgggaggccaaggtgggaggataacctgagctcaggatttcgagaccagcctggccaacatggtgaaacaccgtctctattaaaaatacaaaaattagccaggcatggtggcacgtgcctgtaatcccagctgctcaggaggctgaggcaggagaattgcttaaacccaggagatggaggttgcagtgagccaagatcatgccattgcactccagcccgggcaacagagtgatactctgtctcaaaaaaaaaaaaaaaaaaaaaaaaaaaaaaaagaaaaaaaagaatacacacacacacacaaagggataaattgaacaaactactgaactgtacttaaaaaggagggattctatacaaggaagaatgtaagtttcgtatataggaaattttaaaaaaaatcaggtttagctgctgatttctgaactacattttcttaaatgaataatttctgaaattaatgacatgtaatttaaagaaatgtgtgttctgtcattttggcttgaagaattgaccactgggtagcattatcaattttatgtaggtactagtattgtatgtctggaggcttttatgtaaaattttaatttctgaagagtcattccaagtattctcaaaagaaaatacaaagttttacataattcatggaacatttttatttgcatacgtcattttattaaagcatgggtaggttttttttaaatcttttttcctccttctttttgctaaataataagacatggattttttccccctagatgagactgaaacgtttcagtaagattctattggataaatctgtctatttctgaatctcaattatggaccaaggtcaatctgacaacgatacactttagtcagatgcaaattgagaaatatagccaagtacttgttttaaacaccttgaaaaaagttaaaacatgtttataatattttaggatgcttgtaaaggcaaacttcatagaaaaaagagaggccttagaggccaaataccaagaatagaacttactgctgactcagtaaataaagaatattttgtgttagtagtaaactcattataaacatacgagttatggccgtgccaatactgccaacatcaatatatgctaagcactttttatgtgcaggcattgttccaaacaagttgtactcttcattttttatctttcttttacccactcaagaaatagaaccaaaagaagaagggaataaggagaggaaatttaataaatatacaaaagatattaaaagccaattctctctctcttactgcacacatgccgagaccagctcggtcggggagaccctaacccagtggcactagaggaattaaagacacacacacagaaatatagaggtgtgaagtgggaaatcaggggtctcacagccttcagagctgagagtcccgaacagagatttacccacatatttattaacaacaagccagtcattaccactgtttctatagatattaaattaactaaaagtatcccttatgggaaatgaagggatgggccgaattaaaagaataggttgggctagttaactgcagcacgagcatgtccttaaggcacagatcactcatgttattgtttgtggcttaagaatgcctataagtggtttcctgttctgggcgggccagtgtttcttgccctcattccggtaaacccacaaccttccagtgtgggcgttatggccatcatgaacatgtcacaatgctgcagagattttgtttatggccagttttggggccagtttatggccagattttggggggcttgttcccaacacacacacacacacacacacacccctttatcactctttccacatagtgtatgtgtgcgtatgtactttacagatcaaatttcctctccttttccatgcacatggtcagttttcaattcatttgtgtaaaatctcccagagtgagcccatgatctgccattctaaattccaaatgctgtaagagatgaaaaggctctggttgtacttgattcatgtggccagcactaacactgctctatgtagaaaatgggaacagcctcataatttggaaatacagctactaagaactcaataatatggttttgagattgattttttttttaaattagagttggtcatgatgacttacaaatacactttcaatattcttgtcacatatagaaaggattacagataagccctaagcctagtcctgtggccctttttcccttctgaataatattatcttggtaatgcagacttagtgatggttgaagtatttcagatggatctgtatttatattaggagacagcagagcatggtgtgtgtaacaagggatttgaagccaggtatatctgcatttaagtgtatgctgtgttttgcaattgttctgtggtcatggccaaattatttgctgttaattttcagtttcctcagtaacaaaaataggggtaataacattagttgtattgtagatttcttgagtgggtaacaaaaaagataaagattacaacttgtttggcacaatgcctgcacatagaaaatgcttattatatattgatgttggttgaattggcagaggtagaaatgatggtagagtagtagttggtagaagcattaatctatcgggtaagtgaaagggacaaggcaactctcaataagatttggcacctgatttgggtatttaactcatagcaggacatgtgtcaagtattctgagcaagatatataacagagtggaaagaagcattagatcaataaggaataccagaaaataggtgatatactagctttttttattgttgctataatgcattaccattagtgtagtggcttataaaacacagatttattattttactgttatagaagtcagaattctgaaatggtctcactggtccgcattcattcttgaggctctggggagaatctgtttcctgccattcacagctgctataggctgtgcacataccttggctcatggcccccttccagactctcctgtcttcctctttatcttttaaggcctcctgtaattatgttgtgcccaccagataatccagaattatcttcacataacaaggtcaactgattagcaaccgtaattccatctagaatcttaattctgcctttcatgtaacataaaatgttcagaaattaggagaataaagatgtggacatctttggaggtggtagagggcattattctgccaaccacaagtaagtacactagtttgaaaatattttataagtaagattttataaactttgtatttagggcaagaaaggggatagaaatacacatgaatgagttactttgactattaaggcaaaataactgattggtttttcttctcaagatatagactgatggctggttcattcctacccattaataagaaattaaccatctgcaacagagtcctttcaaataattgtgtcatttataatcatgtggaataattgaaatattgggacacactaaaagacagattgaatgaataattagatgatgataaagaaaagcaaggttaaacattactttaaattttttaatcattgaggacaaatatatatctgaacaagagtccaaataaattattttatctggaaaagtggccatcctgttaagttatttcactacgaattttcaataacgacttgcttttttgattctgaatatataaaagctatttaattttgccatctgttctcagaatgattacatataaattaattgtgggtaataatttttagaatgcattgaatgccaagatactcaaaatgttccaaagggagaatttatttaatttcattttccaaagtaataaagcaaacttctttaaaaagtgaaataatgatacagtctttgctactttaatgtaattttcattttttccttttttcaagattttggaggaaatcgtatccaaaattttgcccaaattcctcacactgttagtaggtttttgcttaagtaggaattcatttatgacttttatctactctcatgtttgccaccttttagcactaaaaattaacattgaaataataaatcctaactcttctaaagttgtcagcataggtaaaaataatgttgcaatagtaagatagaaaacaagtcatttgtttataggtaggtattttttaaaagatgtaaatagctgacagagaagcctgaagtacctcaagagaagaaacaaaacaaaattaaacaatgacaaaaaatttaactaggaattattaagcagctgtcacatgcttggaactctcataagtggtttaacagaacaaacgaggttctagttctcatagaacataggctctagtgcatgaaagcaggtaatataaaataaataaaaaacacagtactgtcaggtacgttggctcacgcctgtaatcccagcactttgggaggccgaggcaggtggatcacctgaggtcaggagtttgagaccagcctggccaacatagtgaaactctgtctctactaaaaatacaaaagatcagctgggcgtggttgtgggcgcctgtaatcccagctactcaggaggctgaggcaggagtatcgcttgatcctgggaggtggaggtttcactgagctgagatcatgccattgtcttccagcctaggaaaaaaagagcaatattctgtctcaaaaaaaaaaaaaagaaagaaaaaaactgtactgataaatggcacatggataattgtaatgtgtttttttaaagaggtcagggagttcactttagattggatgggttaggaaagctgctctagagttgacaaatcagctgactgataatgacaggaaggatagaaatataaagattctgaaaaactggtaacagcctccctactaagttatatttttctctactacaacattttctattcttttattataaaattgatgaattaatatatcatttcttcaacatttctctttacgcttattgttttattgctacatcattgaacatctaattttcttattttttaatttgcgataaatgtttatttcattataaactatgcctatctttctgagacttttctcatagaataaatatattcagctttctatttttttctgagatttaaaaagttattggtatacttgtttaaaaaaaatgccaaattctttcatatttatttgttctgttgatgttacctggttcttttctcaattttttattatcttgtcttaaatttcagaagatataaaatgtctctgaagtattattttgctcaatgctataattcatatgcatcccttatgtatgtgggtatgtgcctgtatacatgagtctgtgcttttcacatctatatttcgaattgtaggttttcctcaaatgtattctaatccatatatgcatactaatgagccaccaaagctgatttaaagctttctgttcaaaggaaacatttcttatctgatgggcttcattgcagaataagtaattactttttgtttgtttatttcatcttgtttttgcatggttcccctattggtctttactgtgagttaattcaagttctttaagatcctcttatgccctgtttggataatcaaagtctaactttagatattctggaaatcagccagtgaagaaagctatggatttcagtattcacttgtcacactttcaaatgatactcgtattttttatataaccatgtgaaccacacaaccccttctttgactattatttctgagaccagaacccctattattcagtttctaaaggtaatgaactgttgatcttatgtgaagcttatgaaaccgagatgccacattgcagggttttgaatagtgtcttagagaacttggggaacaagatttttatactaattattgcactctcctggctgtgttgagtgtcccaccttgcatgtatgttctgcaacatcaggttatatgcctttgcttatttcacacttttacagtctccccaatatctgcacctcctaatatctgtatcatttttagagatctccacagtatctggctctcctaatatctacattgcttctacagtaatgaattataagttacagtacaagaactatttaaatttgctaccatcaaatctccaagtttggtcacatctgtattaattcatgacttttcctctattgcaattaagacgttgtccctcttcctccctcaggccaactttgtgcttgtactctaaatgtcagtctcttccacttttttggaaccttagtgttacttgatgctgtctcttctttattttgagagtttttcagcctactctcttcatttcacattacaatacctcaatgtcaccatatattaaaataaaaaattccttgattccacaaattattttacacctctttttatctgtctttcattattttttttccaaagtgcaatcaacattcaatccttttgttttttcacctcccagatgaacattgaccataggatttcttaatgtgagtttaatcttcactatcggcagagtgctctcctagcaatgccattgtttctttgaattatatttttcattttactgtaatcttagatcatctttcttattttctgagaatttgatacagttgtcaggagctcagctaagttggagagagctgaactgccaggtgtcagaatagccaattaatataacaagccaaaatcaaagtaacagccaaggctttagtgacttactgcgattgtataagcaagatgctaaacagtctgtctcctttctggttcatgatgaaccccaaggaataaaacgttgaggatcaagtggatcagcaaatatatggaggtcatctcactgtcaagggagaatggaacaaaaaaactcctgcaattctgtgaacccagaggatggggagaaattaatgagaagggctgggagtgaaatactgggtccgagggaagaaaaagcatcaaggccaccctccctctgataagggggttttagtttctgttgaaggccccctataaaaaggcctctggacgaaagcatctgggctaggatgcacgtgtaaggacaaatttcggcacaggggtccaagtccttgattgcaactccctgcagcccacagtgccttggctgggcaacaacgctgatgtgggaaaaacagcttccccagtgaggtctgttgggtaaaagcctttccaattttctatggtcgggcttaaaaagatcacatataggtttctaacaagagccacactcctcagtgcttattcctgaaatacttggtttctgaactttccattataacataaatctcttaagagattatgctgtgtagtctaatggtaaaaagtaagaactctgaaatttggctgcttgggttcaaagaccagctctatcttttgttagcttgtaactctggggaaattgtatatttctctgtaccttggtttcctcatctgtaacctggggaaaatagccatgtaagaattgaattaatttagtgtagatgttttacaatatgttagggaacctgttattatattaacctgaacacactcctcagattttcaaactcctaaacttatattttcaggctttgcaaggtatgaaaagggtggtttaaaggcttttcatgtatttcttatttggttttaaacacatgtgccatgttaatttaaggaatatttcaactgatatcctaaaaagtagttttaaatttaataatacaactttattattcccttatttcatgttttaccctgagttttaagaaataatttttccttggaaatttcatggaggcatgatttccatgccagtaagtttgtaagagataggcttagacagatttaggtaaatgattaaaggtcagtttgtgaataggatactcttatttacatgtctaaagtttaatgagtttttctccatgaagaatattcagaaatctctttccattttaatactatggtatcggaggaaacttaggagtaaatgatatagtaaactatttccccatttgtagagtctccacctctgtctttttacagatactattccctcacttctgaaacaggaaggaaaacaaatataaaagttatggtgaaacatggctgttgtagactgaatgttttagacatctcaaaattcatacattgaaacctaattcccaatgtgacagtatcaggagatgtggcccttgggagatgattaggtcatgaatgggattggtacccttataaaaggggacccaccctattataagcttcctcacccagtctgccatgtaaggacgcagcaaaatctggccatctacgaaccaagaagtaggccctccgcagacacaaaatttgccaggatcttgagcttcccaggctccagaatcgaaagaaataggtttatgttgtttataaaccactcagtgcatggcaattcgctatagaagcccattggactaggacaactgaccaacatttctggagcaaatgaagatggtttcatttagtttacttatacattacagcataaatttctcgtattttagaaaaccttaacctttaaaaagatttttgcacagtatgtctaatttgattcttacctttatgcctccccataaccagggctccacagacttcttaggacatgcagaatggtctgtgcagtattgttagaaaacaaaggaagaagtaaaatgcttctaataccttagaagcaagccatagtatattcttaccaaataatttttatgttaattataaaatttggttgtacatgaaaactcgctaaattatatagatatataaaaattttcttaaagactttttatgtctattcataatagcaaccttattactataagtgctatgttaagaattattgcgttttgaaaactagtccaattatttttcctctacattatattccgatttaaaaaaattgcattgggaactgaaaagaagagaatagggggtctattcaaggaaaatattattcttggaatatgtctgagcaaaatccatggggaaaaaaaaaaatatatatatatatatatatatatatataaagtttagaatatgtatcattagaagtatcatttctaacctactttctgtctgtctttctgtctgtttttcctagttgaagacagactattttgtttgttgatgtaaatatgaatttttaaataaagtgatttgaaaaatttactgtattgtcttttaaagtagattgtcatttgaaagtgagtattttcaacaagcattttgaccgaattatggatagagatatagataggcagacaaaattctacaatcttttaacgtaatatcaccgtttcccttccatcattgattaatataaataaattctgactgaacagaactcttgggtatataaccttttcttgactttcatttgagttatgtacacatgaaaggtgtatagaaatgataataaaatactttatttgcataacacctttgagcttaaaggacaccaaatgctttcataaacacaatttcattacttctaatggaagcaacaaatattatcatagaggaaacagagggaagatcagaaaagccccttatccacattatttcaagatttctttcatgacttctaaatattatgatttaacttatctcgttaattaccctaatgaaagaggaattcgagtatatcctagaatctaagcacattgttagaggataaatgggatcttttttaaaaaaacaaaatagacctaaattgcttgactgtgttggaaatgaagttattgaaaaaaagtgtaagaattcaaatagcatattttctaggcaaaactcattatagtatgtgtttggtgtagtattcacaattaaaataaaaagcgaaatacatgttctatgtttatttttattctggaaggaaattgaatggtttaaatagattaatattagcaattaaagatattttataatatctcaaatttttttagtggcatttatatacgtagataaaaaaatgtgaaataataattgtctgtcatgtgaattttttttaacactggaaccaccaggaagtaaagttgaaaaactaaaattttaaagcaggttgatagcaggttactagagaataaatgttacattcttctttattacgtttatttggctatgccatcaatcaaagacacttatataaggttgtgatgatgtcactttcaataacaagcttgacaggaacaatctttatacattgacatgacatccaatttaggtactctgatttttcagcctgtcactagaagaacttcacatttcaaaaattatagcattcaccacagtaaatgctttagttaaaagtaaaagacaactaccttcatgtatactcttctggcataatcttattaagtacttatgttttgtcacatatgcttttgtgcacatacaatttggtgaggctgtatataaaagacttttgaccacttgtgatgattaatattgagtgtcaacttgattggattgaaagatgcaaaatgtgttccttgcggagcttgcagtgagccaagatcgccccactgcactccagcctgggcgacagagaaagactctatctcaaaaaaaaaaaaaaaaaaaaaagtgtgttccttggtgtgtctgtgagggtgttgccaaaggagattaacatttgagtcagtggactgggagaggcagacccaccctccacccaggtggacaccatctaatcagctgccagtgtggctagaataaagcaggcagaagaacgtggaaggattaaacttgctgagtcttctggctttcgtctttcttctgtgctagatgcttcctgcccctgaacaacaaactctaagttcttcagcttttggactattggacttacaccagtggtttgccagggcctctgaggtttttggccaagactgaagactgcactgttggcttccctacttttgaggttttgggacgcggactgatccaccactggcttccttgctcctcaacttgcagaggacctatcgtgggacctcaccttgtgatcgtgtcagtcaattctccttaataaactccctttcagatatacatataacctattagttctgtccttctagagaaccctgactgatacaccactcaatagacaagcagaacatagcaaacagaacaaagtctcaaaaacataatcatcgtatccttggtaaaataaaaaattaattcaaatggccagaaaaaaatgagaaattggatctgctaaatctatgatactgctagagaatccattattaaataatacatagtttgtatattattcctcctaactgaaatttgttcctctctttgatttctttcttttatttttcccgttacaatttacatttctaggttttgttttacatttttagtattttcatttatttaatttgatttttttctatatagaatcataaacttttcatgtgaaatatgctatatgaatcctgtaggtatacataaatactagcttttcaaggtaatttgttagagtgtatttcacacactgggaaatatccagacttgtacatttaatggcagcattaaatgcttctgtatgccacttaatgaaactacacttcaatatgaatgtaaaattaagggtagagacctcacaacatcctctgctgcaagtcatgtacaatatccaaaaattaattccatgaataattattaaaagtttactttgatttccatttctctaataagcagtaatgatgagctttttttcatatgtttattggccgctgttgcttaggttttcttctatggtttttatgatttggagttttacatttaagtctttactccatcttgagttaatttttgtataaggtgtgaggaaggggtccagtcttagttttctgcatatgactagccagttttcccagcgccatttattaaatagggaatcatttccccattgtttattcttgtcaggcttgttgaagatcagatggttgtagatgtgtggtggtatttctgaggtctctgttctgttccatttatctacatgtctgttttggtaccagtaccatgctgttttggttactgtagcatttttttaacagtgaattccagaaaaggagttaggtttattattgtaggttagtagtcttaattggatagcctctgtattttttgataagttcttattttaagtgacgatgtaacaggatctgggatgtaatgtgaggtccttgtcaaaatagaaagcatgtatcatagatttctaaatagtcatgcagagcagctaagatatgcaagaaacttgcccagcaacaactatgtaatttttgctaaccatatggtattctttctccaattgcccttcatattttgtattccaaatgattagctaatagtttataattgtttatgttaagtattcatttcttggtctaaaaatcttagtaacttagaatttgataatgttacccaggggagaacaaaaaagaaatatatattaattttctctttgctttatgtctgttttaaataatttttgaatgaaaaatctgcccttgatgattagttgctttgtgttaagagtgctttaatggtcttttattaagctttattaaaaaatggtcttttggactctttaataaattttttttctgatttcctaatgaggtcttcccatgtagccaatcattttccaaaaggcctgatttagtagtcacccacttctctgaataattattcaatttagccaggtgcagtggctcacgcctgtaatcccagcactttgggaagccaaggcatgtggatcacctgaggtcagcagtttgagaccaggctggccaacatggcaaaatcctgtctctactaaaatacaaaaattagccaggtgtggtagtgctcgcctgtagtctcagcttctgaggaggctgaggcagaagaaccatttgaagctgggaggcagagcttgcagtagtgagccaagatcgtaccactgcactccagactgggtgacagagcaagactctgtctgaaataaaaaaataaaaaaataaaatcagtttacatgtgtgtgttttatatgagctttgtagaaaaaaattaaataacatttatttctgacagccttttatactcgatgatttaaaaataaaagaaaaaattatgaatttagtttacattagtttatagcaagccatgtagtattacattgttaatatttcacttctccagtccctttacataagagatgtgctgaaatagctgggtcatgactttaaataataaagaagattttgctattggatggtgccaatttcggtaagacaaattggtgaaattggaggatttacttgtggtcagcttttgttttttatttatactgattctgtattctcatttttgatgtttggttcctattaaaggtcactaataattttatcttttgatcttttgtggaaataattgaagaacaaccaaataagaacagacaaaagctatttttgaaagtttgtcatagcaagagagtcattaccctcatctgcactttggcagagacccaaagatagacaaaggagtggaaaagcttgatagtggaaaaacggaaagcttcaagcgtgccctgattggaggctgttagcgttggggagctgtaggcagtctaactagaagcagggcatcccatgtgattgattaggagtgtatatttggcttcctctgtcctgtctgatatttgaagtagagacaaaaattagggaagctgtcagttattaatcaattcctagaaattgtaggcttattgttacaggagttattgtttcttttcctaaaatatttgctagagatagttgttttacttcctgaaagtttaactagtggatattaaatagttcaggttagtagataatagtttgcctttccaggctggttattctagatgacaagtcgatttcttgggctgcagatttgtgagtcaaatttctatgttttatttacggccattgtccatttgtttatctagtctcagttttcataggtaaactttagacattattgcctaaaagtttatattaattctgggttgatgagcaaagtaatgggtacagataagtataccttttttaatctgcttattattattattattatactttaagttcagggatacatgtgcagaacgtgcgggtttgttacataggtatacacgtgccatggtggtttgctgcacccatcaacccgtcatctacattaggtatttctcctaatgctgttcctcccataactccccaccccctgacaggccctagtgtgtgatgttttcctccctgtgtccatgtgttctcattgttcaactcacacctatgagtacaccaagggttaattaagaaaatagcattgatctaaaatgcatttgctatctttttgtgtttgtcatatattatagaaatatttgttatcacttgaatacctattgtcaaactcctgtttttcaagacaagacttttaaaaaacagtctaactcatttggattggatttgcaagaaaaaaaatggcctttttactttgggaaatttctagtcacttcagctgattgtctgtaaagggaaggtagcattcattgatgaataaccatgtttaccttagattatggtcttttattcccgagggtgatgtttaaacttcttcaaattctgaggagaatgaagtgcattcataaaaatatttttgccatttattgaatttcttttatatactagaaaatttcctacctttatatatatttttttcaatggcatctctaatgagcagtatagatatacttaagaaaatgagactcagggagtccctacattctggcagctagggagagagaattcaaagtcctaacttcattatgctttacagttcctcaatgatgtagttttattttgtctacaaattatatgtctcttaaagtgaaactataaattacatacaacatcgaatgtgagaggaacaggaattacactgatctggaataaagtctgatcctttcttaagtccctgaaccgctaatgccacaactgctcgctaatgtagaattcatttgggagaataacttggacttaaaataatgttagaaaaatatcattaaagaaacaacataggaagttaaaatagaaaagcatgcttaatttttgcaacccattatcatagtttaataaaatttaagcactttaaaaaaataagtaacagagaaaaattagaaacagcctaaatatacatattaggggagtaattcaataaggattatccatccatacattggatcatcaggtgttaattgatcattatgttttaatttgtgatatttagcagggatttattaaataagacctgtgagtgtttttgataaacaagataaataatttttaactctacctgcatatttaaatattgaatgttttatggtagcaatatgtagaatattgtagcaatatatttacctaattttcagttgcaaatataaataatttccatttttttcactcaatactcaagataaaatgaatgttcctcctttcagctttgtcatgattgagcatttgtaattgtttagaacataacgcctgaattgaaccgttgtgttctggcagtaggcaatgtcagtagcccgagtaaaaaatagtgtcagttggcatttttgtctttgtcatcactcttgtatggcagatgagtgttcaacaagaagctcagcctactaccctgacaaatgacatattcatttctatctagaaatgttttgccatcatgcttttatataaaatacatataatagcatcatcatttaaaatgtctttaagttttgcatgatctatttgcatttgctttgttttcactttgaattcaaaatacatacggttatttttcttagatactctcatatagcacattatacataattaaaattttcacagaatcattcagattgtatgaaaaggtgcattttaacatttaacttttgtcactgaatcctatgtataaagaatattataattccatttatactttgcatattcccctgttatattttaccattaaaaattaaagtttataagacaaacttctaaacaataacataaaatgaaataattttaaacttctcgtttaatattatataaataatctacagcaatgatttcacaatttgaccaacagattctccagagactcctcaaatcctgcagactagatttaagttggtcataattacaccatatggacaatgggttggtatttatttggtttttgctttcttctaaaatgggtttagtactttaaattataatctaccgttaaagaaaaaaatgaccatggtaataatgttaccacacacaataagggaaaagtttccaggtttctgagaatgctttgtgtttttctttatttttgagagaaatagaagcccatttaggccctcttgtcaccttgttctctacatttcagatctttgggagacattcagtttcacatactgtcttcagaaaatgtgtttcagaaaaaaattataactaaaagtatgtcactcaacacatcatcttgtaatatatttacttacgccttatctcctattagaacaagtgtctcaaagacaatatctatgtcctgcacatcttttattttctctggctcagagcctataataattagataagttctttttactgaatatttagatatatctaagtatctgttcttttgatctcattgtattatgggagaactttccaacactacagtcacttgatctttttcctactttaagacctgcttttcctccatactcttataggaactctttgcctattttaattctaaattctggtgttcctccagggttctgttctccaagctgtctgtatatgatgattcccttaactatattcccagccccagcatacccagaatactctgttcaaagtaatacacacacacacacacacacacacacacatgcgtgcacgcatgcatgcacacacaagcacatgcacacgtacacacacaatcacacatatatactccaattgggttcttataggcaccttatttatttaattatttatttaatcaagaagagctgttaagcgcctacctcaagatagcatgaaaatcatcactcaaaattaacaagaataagccaaaacaaagttttttattactcgtactcctacccacaacaattttttttctttttaaaagtcttccctatttacataaattattataccattcataccttgaacacatttttaaattactttttttaccatggttatatacatacaacataatatttaccattttaacagtttcaagtgctcagttcagtggtatcaaagacatccgtaatgttgtgcaaccatcaccactatccgtctctgtaacttttcatcttgtaaaactaaaactctgtcttcattaagcaataacttctcatgcccctctcctcttctacccttgcctttggcacccatcattctaatttccgtctctatgattttgactacgctatctcacacaagtggaattatatagcatttgtcttcttgtgactggcttatactacttagcataatgatctcaatgtttatctttgttgttgaatgtgttagaattgccttcctttttaagattgaatactatttcattgtatttatagttcatactttgttatgcaatcatctgtcaacagacacgagctgcttccacattttagctattgtaagtaatactgctgtgaacattggttgtacaaataactcctcaagaccctgcttttaattcttttgggtatatgcacagaagtgaaactactggatcatagaccacactatttctgatatatgcgcaggcctgaattattctctgtttctttggtagtttcatactgtctgggactataatgcttttgtaatctatgatcactccaattgtagtctccaaactaatatctctacctccactcttgttttccaggtctctttacatagagcaatcatagtaagatttttaaagcataaaatagtaaattaattccattctgtcaagaaagacagatggcaattaaaacaatcccaaatttctcataatcttctacaatgcaggtatgaaaatatttgtcttcttaattttacatgaccaaatatgtgtatatatattccttgcccaacacacaatttcctgtatctcctaaaaatacaaacaatacaaatgtcttccaggacatttgcaacttttaaaaaaatttatggtatttatttgtttatttgttttcatattggaaagtctctcaaatgttcatatgcctgacatttctcttcatttaaatgccatctcaaatgtccctttttcattatggatttctctcatgatcctaggcaggggactcatctagtcactttcatattatgcctaatcatattacattttctttttgttcttatcactatatgaagttatccaattcgtttgtttgtttatagtagattagagatcgaaggtttgtttatggcaaatttaagtcatgaaatacccaccaccttcttgtgtctcctgtatcacaaagccaagcaggacagtacagtgtctttacctgttaactacgacccctggcctcatgctcggggactagggattttatagtgacttcaagattcagacataaagcaccaaggtgatgtaaacttggtatcctggggtgatagtggaccccacaccatagcattacaacagatttttgttaaccaaaggcctttcagatttccacatgactgtgaatgtcggtgtgaataaatgccaatgagcatgagattagataaatggaagaacagagcccaaaatggaaggagacagaggcagcatcctaaattgactgagttaccataagtgacttggggaggaaaaaatatctggaaatgactgagatatatttgaattgattatgtaatagtatcaactatagaaacaaacttgaatttccagaactaagtctaaattcattataaacaaataaacttccagtttgatagcacagcaaaataattaaaatacatggtcactaactaagaagacatgtacctttaaaagcagcagaggctattggtccttgatccaggtgatactgaagcacatgggtcactgttaggagtttctaatagaatagaactgagtacaaatatttttacaagaacaaaacatgtaaacaattgactaaggtttttcatcttattagaatctttcttgatcatatgagatagtcacaaatcatgaccaaccaggctacactaagaaaaaattgcttctgttatattaaattataagtgaaaaactcttccaaacaaatactatgatatttgtattgaatatttccttggttctttaacatttaattcaaatggaaggttaatttccaatatgcaattggcaaaagaaaaatatgcaggaaccgtatcaaattatatgtgcaactatgagcagagacagaatacatatgtaacaaaggtttaaataagtttaggctttagcaggtataatcactgaagaaaaagaaaactaaaaatattttgagggaaagagagtttatgttagcttacagtgttctctcttttcttcctttctttcctatagcattttagacaaatggaaggcttagaatgaaggttgagcaagtcgatgtttgtgttagctgaagaagagtacaaagcagagtgagaggaggaggtaaccagggggtatctcaatatgaaccttgccattaacttaaatgaacagtccagaacttttatcacactcataattcactttcacatgggatatatttagttgtctctcctggagaaatgatattgcaccatacaagattaatatagcttgggccctggtggccattatgttgccacaggtttatggtttttctacagtattttgatttatgatacccttccttttaatagaggttcattatttgtacattaaggttgtaacttactccatcatagggggacttctattaatcagggatcctatgtagttcaggttgacattactgtcctttttgacagtattgctcaagctgagtcatttgttaaatgtgcaggccctttgtggcttaagattcacttcagcagctggggaaacattttcattctgatgcaaaatgactcttatgtgtcatttcatatgtcatttaatctaggtgatagatgcttcaatttaactaactcagcattatctatttattttgattttatgagctctcctttaaataattcaaaaatacaaagctacgttctatcccaggcttagcatgtcacttgttaaggaagtaaataggcataaacagaataatactattcttttgcctttagctcatagtactgaaaatctcttttccacagatgttattttatcagagagagagagagagagaaagagaggcgtgtttaaggttagattcaatatttataagctttttaaagttctgaaattccacacacttttaattcattgtaggtttgtagatattacatttctatgtaactttatatattttgtttcagaactccatatttcaaagagaaaagaacaattctgatgagatttatttgctaaggaatattaatagtgaatttttgatgaaataataccactgtgcaaactctacttagtgatttgagatttagggagactttatttgaagtttgaatttacataataagttcagggaatataatgcttcatgtcaatatatgaagggtaaaatgataactaataagatgtcttggttcaagatatatattagcaatacatatttaccatgcaaaatatttaagtcctcatgctagaataggtatatagaattttccagaggctggacaggcaaatacagattaaaattatttaatatttaacatattaagggtaaccacaaccataaggaattgaaaagttgacttttggagtctttttaattttgtattgtttcctaattactgcttaaagtctgagcacagctgccattcaaaagtcttgtttttactattttattttacatttgaaaaatagaatatatttttacttataagtggaagctaaaaaatgtgtacacttgaacatagagtatgaaatatagaccctggagacttagaaggtgggaggtggaggagaggggcagatgatgatttaatgggtacagtgtaccttattcagatgatgggcacactaaagttctagagcctgttgactacattagaattatgcaataaaaggaggagacacaaacatttggaaagaaatattgccaattttggttacctaggttaaagtcaataaatagagctgataattaaatattactaagtacttgaaaatatctattacctaagaggagatatagcagaaacaaatatcaaaggatttatatgacctagattttgaaattattatgatcagattacagaaaaatgagatgttaaaaatgggcaataagaaagattataaaaattatgtgtggacttttaacagttaaatacagagcgtattagaagtagtttaagagagaatcagtaagatgtaagctgaagtatatagaaactatacttatggcaaaaaggagatattataaagaggaatataaaatattaatagatttagagaacgaaataaaattgaaaacacctttaattagagtctcacaggaaaagaagagatggagtaaagaataggcaaattctcaaagaaagtgcttgctaattttctggaactagtgaaaaacataattctacatattgcgaaatcacaatatatataaagagaaatgaataagaataaatctacattcactccattaattgtatattatagtgtagcaaagattaaaaagacattaaaaacaactagggagctattccgtgctctaggatgcttggggatatagatcaaatcaagagacattttccaaatatacacagtagcatcaccagtagtgatccaaaagaacattttgctatgtatatgaactttacaaatataagattcacttcagcaacaaaagaataatttcatccttatgcagaatgacttatgtatattttaatatgtcaattcgcatggttaacctattataagtgactcatcaagtaatttgaaaaatcaggatagagagtacttttgtatttttgttgtatttaaagcaaaatcctacataatttactttaatgggtgattgaattaggctgaaactccaaagtgaggcatatgaagggaaaaaagactaagaaaagtcaaaggagtctgtacataggaaaatatcaaacaggtttaatatatttgtaatataagatctagaagaaagcataaggcaaaaaataactttttatttccccttgaaattttataaaaactatacatttgtttattttaaaaaattgttttatctttttttgagacagagtctcactctttcacacaggtgggagtgcagtggcacaaacacagctcagtgcagctgcaacctcctgggctcaagcaatcttcctgcctcagcctcccaagtagatggagccgcaggcgtacgccacactcagctaagttttaaattttttgtagacaagaggtcttaccatgttgcccaggctgctcttgaactcctaggctcaagcgaacctcctacctcggcctcccatagtgctagaattacaggtgtcatccactgcacctggtcaaaactagaaatttagagatacctaaagctcaattaagcctccaaaaaaaccaaatgtcaggcgtttctccaatgtttccttctagtagttttctccaagttttacatttaagtcttcagttttgaactgatttttgggtatggtgaatgaatgatggagtctagtttcattcttctgcgtatgtgtatagcagacacacctatcagcaacaacttaagaataccctgagaaaggccctatgacctaagaagagctctgaattaaggaccccaggaatagccaacctggggataatcgttatttatgaaggacatccaaagccctggcccattccttggaatgcaggctgtacaggggattggggccctttgttttgagttcaatggattgctaggaggagggtactaaataaaatttgctaaataaactgcatactttttacaaaaagtagtggttctcctgtcaagcccgccagcactggactgctccaaaatgtaaattttcaataaaacctatgtctcattcccttgctctaggtctcttcttcaaattctcagactcagtgccatccctattggagtcaatagaggtccagcacaacaataacgatatccaggtttcccagcaccatttattgaagagactatccatttcccaagatgttcttggtatgtttgctgaaaacaaattgggtataaatgtgtgaatttatttctaggttctctattttcttccgttaatctacatgccttttttaatgagagtaccatgctgttttcattactattgctttgtcgtatattttgaagttagatagtgtgatgtctccagctttgtaatttttgctcaggattgctttggctattcgaggtcttttgtagctccatataaatattaggatttctttttctatttctgtgaagaatgtcaattttttgatagagtttccattaaatctgtagatcattttgggtagtatggacattttaacaatattaattcttccaatcagtgaaaatggacatctttctcttttttgtgtgttttcttaaatttctttcatcagtattttacagtttttcttgtagacatctttcgcttctttggttaaattgattagtaagcattttattttttgtacctattgaaatgggattgctttcttgatttctttatcagattggttgctgttgacatactagtgatttttgcatgttaatttggaatcctgcaactgtactgaatttgcttatcatttctaacacttttttggtgaactctttaggattttctgaatagaatctcatgtattctgcaaacaagggcaatttgacttcttgtttaatttggatgttctttttttttttcttttgtctaattgctctggctacgatttccaataacatattgactaaaagttggtgaagtgaacatctttgtcttgttccaaatattagagaagaggctttcattttttttcccattttgtatgatgtcagctataggtttgtcatagatggcctgtattgctttgaggtatatttcttctgtaccagtttgttgagaagttttatgataaaaaatgttaaattttatcaaatgcttttaaaatatctattggaataattgtatgttttctgtttgggcaaattttttttgagtgagacctcaaaagcataggcaaaagagcaaaatttgacaaatgctattatatcaacctaaaaagcttctgtacagcaacggaaacaatagagtgaagcaactacctacagagagggagaaaatattcttaagttattcatctctcaagggattaataaacagaataaatgacagtgaaacaactcaatagcaatataaataaaaataatcaagtttaaaataagcaaaatactagaatagacatttctcaaaagaagacatacaaatggccaacaggtatatgaaaatatgttgaacatggctaatcatcaggcaaatgcatatcacaaccacaaggagatatttttttttttttttttttttttttgagacggaatctcgctctgtcgcccaggtcggactgcggactgcagtggcgcaatctcggctcactgcaagctccgcttcccgggttcacgccattctcctgcctcagcctcccgagtagctgggactacaggcgcccgccaccgcgcccggctaattttttgtatttttagtagagacggggtttcaccttgttagccaggatggtctcgatctcctgacctcatgatccacccgcctcggcctcccaaagtgctgggattacaggcgtgagccaccgcgcccggcccacaaggagatattatctcaccccagttaaaaatgaatattgtcaaatacacagaaaataacagatgccaatagggatgcgggaaaaagagggagaaaggaatactcattgactgttgttgggaatgcaaattagtacagcaactatgaaaaacagtaacaagattcttcaaaaaactaaaaatagaatcgccatacgatccagtaatttcactgctggatacatattcaaaacaaaagaaattagtatattgaagagatatctgcattctcatgtttactgcagcattattcacaataatcaagatatggaatcaaatttaatgtccttcaatggatgagtggataaagaaaatatggtatgtgtacacactgggatattattcaaccataaaaagtgaaattctgtgatttacagcaacatgtatagaatcggaggtcatgttaagtgaaataagccaggctcagaaagacaaacacgacatgcttttacttatatttaaagctaaaaagtggatctcacaaaattactgagtgaaatggtggttaccagagactgggaagagagtgtagagggagaaatgagaagaggttggttaatgagtataaaaatacaagtagatggaatatgttctagtgtttgatagtacaatagggtgactatagttaacaagaatgtacagtatttcaaaatagctagaggagaagattagcaatgttccaaacacaaagaaatcatttgaggtgatggatattctgcttaccataatatgatcattacatatcatttgtgtacataaaaatattacctataccccattgtgttagtatgttttgcattgctataaaggaatacctgaggctggatagtttatacagaaagaggtcatttggcttatggctctgcaggttgtacaagaagcatggtgccggcatctgctcagcttctggtgaggcctcaggaagcttttattcacagagaaaggcaagggggagtcagtgtgtcacatggtgagagagagcaagagagagagaaagaggggccagactttttaacaatcagatctcatgctaagtaatagagcaagagatcattattactacagggacagcacaaagccattaatgaggaatctaacctcatcacccaaacacctccccatctccaatgttgggaatcaattttcaacatgagatttggaggacaaatatccaaactatatcatccataaataggtattagtattaataaaaagtaaagtaaataaatataatttgttttgaaaaatagaagaaaataaacctaatgccaggaattttacaatcatctttctgaaagacatgtgataaacacaattttttcaaagatgcttcagaaaataatagaacactgcatatgggggaatgaatataataatgacaacagatttattagaaatagtacatgcaaaaaacattggagaatattttttaaatgctggaaaaagaactatcaaactagaattctatatcatgtatgtgtttatatgtgtgtgtgtaaaaatatatgtatgcaacgtaggtaaacaagtgaggtaaagacagttttagagaaaagaaaagctaagagaatttactaccagcatacctacagtacaagaaaaagtaaaggaaattctacaggcagaaattaaataattaggtggaaacttgaaaccttataatggaatgaatactgcactaaattttatatatatatatatatatatacacacacacacacatacatacatacatacatataatttgtatttttttatttttaaaataatttttttctgtcagcatagtaataccatttcatgtatttataatacatgataacaatagcaaacaggaaaaaaatgagaggaaagaatatgaaaggatgttgtggaaaagtcttttcattaagtgagtgctattttgtttcttgggaatagattttaaatattaaaaatacatattggaaaatcaagcactatagctaataagagagtaattataaaacagtacattttaaaaagctaacctattcccaaatgaattaggaatggcaggggaaatgaacaattaatactgggacaaatagaaaataaatagcaagatgctatattaaaatcaatactatcaataattacgttaaatgtaagtgggctaaatacttcaatttaaaggtcaatattatcagaatgggtaaaagaaactagatccaaatacatgctatttgcaaggaaaagaccatttaaaggcaaaattaatattatagtgaaagattcaaaaagatgggtgataggaacactaatttttaaaaaactggtatagttatattattattaaaataggctaccaataaaataataatgtccagataaagggaaatattttattattataaaatggctacttgattatgaaattatgtttttcaattgtctacataataatagacttttgaaatatgcagttaaaatttcatagaaattgaaggagaaatcacgatagagactttggaacactaaatttaacaaaaacagcgtggttacgagtgaactggcactcacatacattgctggtgggaaagtaaaatgttacagccactttggaaagtaatatgtttgtctcctgtaaatataattaaacaacattttactaagctatttcacttctataggtatcaatccaagagaaatgacaatctttgtccacacaaatattttatgtcaaatatttatagcaatattattcatatccccaaatcagtaataataaagtaattattaactgaaaaattgataaacaatttgtggatacgcaatgagatactgctaaacaagtaaaaagagggagaaggagggagagggacaaggagggagagggacatgggttggaaaactaactatcggatgctatgcttactacctggtaactggatcagtcgtatccgaaacttcagcatcacacagtatacccatgtaagaagtctgcacatgtatcccctgaatctaaaatagaggttgaaattatttaaaaaaaataaaaataagcaaattacttatatatgcatcaacatagatgaatgcagaaactttatactaagtaaaataagacatgtacaaaacagataagcacaaacaaaaactgtttatatgtatgatgattccatttgtaagacattttgcagaagacaaaactaaaaataagagtgacttagcggttgcaactggttaaaggtggaggcaaggttggactggttgcaaacagcataagaaaatgtattttactgacggaaatttgttatatttacatggggcgatggttatatgattgcatacatttaccagaatatattgacatctctacctttaaaaagtccatggacgtctgtgtaaattatacccccaaaaatctggcccccaaaaattaaacatttttgtaagactaatattctttttactacttctttttctgggctgtaattttgtgggtttttctttcattttttaatttttaattattatgggtacctaatagttgtatatacttgtggggtatatgtgacgttttgaaacaagcatacaatgggtaatgatcaaatcagggtaactggagtaaccatcacctcaagcatttaacatttatttttgttggcacaattccaaatctcctctagctattttgaaatataccataattcttgttaactatagttgcccaattttgctaccaaacactaaatcacatttattctatctaactgtatttttgtacttgttggttttggcatgtacttatagtagtccttgctttaggcccacctgataagctaactatgagaaaaattagaggataatcctttgtctttagagatatcattatgtcattcatataatagcaaacatcatgcatttaatatctttaaatatgattcttgcttaagagttatagtcttttcaacatttgattaatatgatgcaatttgcggtttgtattaatattatattaaatgtagaatgctaaaacattaaagtaaaatagcatttctaatatttgctacacatacattaacatcttctcaaactaaccaaaacataatccttgctatttagttgtactgaaacaaagcagttatccagttcaacttttatgttttatagatggagaaaattcacacagggattatcagacttttttttttttttgagacagagtcttgctccattgcccaggctggagtgcagtggcgcgatattggcgcactgcaacatctgcctcccgggttcaagcaattctcctgcctcagcctccgagtagctgggactacaggcatgcgccaccatgcccagctaatgtttttgtatttctaatagagatggggtttcaccatgttggccaggatggtctcaatctcttgacctcctgatccacctgccttggcctcccaaagttctgggattacaggcgtgagccaccacgcctggcccagactatttttataacactcggaatagtctttggaaactaaatgatgtatatcaaaactcaattcatatattgacatggctgtgggcttgatccctaaacatcagttcatataatgtctctttgccttagtttattcatatgttccaggtgcttttactatatttctcttcaaaatttaccattgatagacatataaagactaaatcccttaatttacaacactgaacaacatacaattagacctcaattctcattccaagtctgtaaatttctccaatctctaacaactcttctattcataataaacagatatttcttatgatttccttgaattattattttattagtgccattttctttacatttttctaccaattgtttttcaaatttcaaacatactttaaggaacactgaagtcttagattctttggaaagcattgctttgtgttgttttgttcttattcaaaaaattggcactataaccagaagtggatttaccatgaggccaagaatgagttggaactctataagaagtcgcagtcattgcaccaaccctgggaagggctttagcaacatattcacctgatcatatgctttgtacacattgcaaaaattaaatataataaacagaatttcttaacattgcagccttttccactggaactttcatcctttgcttttcccacctttagcatgggcaattttgggattagaaaagggaaacatgaattgagggtatagttagtatatttagttcaggtttagtgtagttgtagtcatttttttaaattccaattgaatttactttgtatctctaaattgtcaaacaaaaattgtgcagacttaaggtgtagctcatgatgagatatatagatgataataaccatactcggcatgttatgtaatagatctcttacatttatttctcctgtttaactgcaaatttataccctttgaccaacattgtcccaatctgcaactccccagcccatggaaaccacagttctactctctgcttatatgagtttgacttttttagattctgtacataagtgagatcatgcggtatttctcttcctgagtctagcttttttcacttaacataatgccttccaagttgacccatattatcacaaatgatatgatttccttatttttaaggatagtttatactttattttgtatatataccctattttcttttcccatatagccattgatggacacttgaattgtattgtgaatagtgctgcaataaacatgggagtttattgaattgtattgtgaatagagctgcgataaacaatggagtgcagacatatcttgaacatgctggtttctttttctttgtatatatacccaggactgggattgctggatcatacggttgttctattttgaattttttgaggaacatccataatggctgtactaatttacacttccaccaatagtatagaggagttctctttttccacattcttatcaacatttatttgattttgttttttgataatagccattctatcaggtgtagcgtgacatctgattgtagttttaatttgcattttcctgatgattagtaatgttgaacattttttaaaatacacctattggtaatttgtatgtcatcttttgagaagtgtctattcaaatcctgtcctttgttttttttcctacaaatcaagttgttttcttactaccgaattcagttgcttttatattttgcacattaacactttatcagaggtatggtttgcaaatgttttctcttatatttaggttgtctcttccctgtgttaattgttttcttggatgtgcagaagctttttagtttgacgtaatgttatttgtttagttttgcctttgttgcctgttctgtttgagtcatatccgaaaacatctttgcccagattaatattatgaagtttttctcctgttttcttctactagttttacaagtttaggttttacatttaagtctttaatttattttgagttgtttctacaagatgtcagataaaagtctaacttcattcatcttcatgggaatatttagttttcctcagaccatttatggaagagactttccttcccccgttgtgtgttttggcatctttgtcaaaaatctactgcttgtaaatgtgtggatttatttctggtctctctaatctgtttcattggtctatgcatctgtttttatgtcagtactatgctgtttaagttactatagacttctcctatattttaaaattaggtagagtgtaatgcctccagctttttttttttcctcaagagtttcttggctactgggtgtcctttgttgttccatatgaatgacagaattattttttatttatatggaaatggcattgaaatttcgacagagttctttcaccactttggttaagtttatttccaagtagttttcaagctattataaatgggattgttttcttaatttctcttttgtatagtttgctgttagtgtacaaaaatactactaattgttgtatgttgattttgtgtcctgtgactttacttaattcatttattagacctaacatttttttctctggagtctttggggggtcctatatacaagatcatgggggtctgaaaaaagagagaattttgcctctttcttttcaatttggatgccttttatttctttttcttacttaatttttcttattaggactttcagaactatgctgagtagacatagcaagtgtgggcatcttttgtcttatttttgatgttacttgaaaatctttcaacttttcgccttgaggataattttatctgttgacttgtcatatggcctttattgtgctgaggtacatttcttctacgtataattttttagagtttttattatgaaaggatgttgaattttgtcaaatactttttttgcatctattgagatgacaacatggtttttgtccttcattctgttaaggtagtgtatcatatttattgatttacatatgttcaaccatccttgcctcccaagaataaatcccagctagtcatggtgaatgatccttctaatatgctgttgaatttggcttgttagtattttgttgaagatttttgcatttatgttcatcagagatattggcctgtagttattttgtaaccatatccacattcagctttggtatataggtaatgctggccttgtaaaatgaggctggaagtgttccttcctctttacttttttcttttttcttctcttttttttttttttggaagagtttaaggattagtgttaattcttctttagaagtttagtagaatttagcagtgaagccatgaggtcctgggctttactttgatgggagactttttattactggttcaattttcttgttctttatcagtctgttcagattttctgtttcttcataacttattcttggtaggctgcatgtttctaggaatttattcatttcttctagtttatctaatttgatggcatataattgttcatactttgttcatagtttctaaatatgaaactgttcacttacatttttagctaaattgtgactagttatccagatgctattactgctcatggtgtggactcttctgccactttgacatggagctacaaggtcagaagttttgtgagaatgtgtcttatgtgagtagttaaggtgaaaaaaaatgttttaagttcacagacacagatgtcaatctgtgaaaaattatttcagatcatttattttatatgtgatgaaggcacagtagagatcttcttaaagttgacaaaaatccccaactcttacatcgttatcaataatagatgagaaaataaatctgccaataaaaaatcttgccaaatctaagatatttttactttctctataaagatgctattacaaaatctttatcatatgaaaaagatcaagggcaatatagccaaaaatacatataaagtatgttattacagctatgtgtccagcagtcctttaataaacataaaaatatatgcttctgcttctggtaatttttatcttttttaaaaatgtgtaattaattacgtaattaatcatttttttctctcaagataaatattcatgttttaatctagttttgcattcttaattttgtatttttttaagtggaacgccaaagtgtataagcttcaggtcctataaatcctggatatgcctatgtaccctctagtagatgacatctttgtatcctttcttttctagcttagaattaaatagacaaggataaatgtatatttagatccaagtaattaaccaaggaactactatgtgctaaacatacgctaaagtccttcacaaattgtttgtttagtcctacaacaagcatattataatactcattttaaaggtaaagaaactgagactcagtgagttgaattgtgttccagtatcacagaagaagagtgtcacacggaatagagaatggcaaagcaagtcataatatataacattttttaagagttcagatgtacccaatactacactggattcagaccacattttttttaatgcacattctctagtaaaggacacaaaaatttaaacaaataaacacattggcatcacaagtactttaacagaactacctacgaggcatagtagtggtataaagactaaagtatttaacctaggggctaaagttagaaaatgtgtgatagtagtcaatttttttgcactattcttataatgtgaataagattttaatgggtatgaagttgaaaattatcaaacctaataaaggaaacagcaaaattgtattaggtcatatggtattttttggaaatattaagctcctggctatgagagcagagggtaaaactttgagggtttttaggaatgtaggagcagaaatgagcagcaacttggaggatagtgggctggatatggtcaaagaaaatgaagagcaaagcgttacaattttggccaacaaagtcagtgacagaagtgatggacccacacagaaaatgatgtttccctgtccgtactcttagggaacacacgcaggcaagcatgaaacaaagaaagtgggaaacatgggtcctcattgttatgaactgaattttgtcacctccagattcctaggttgaagtcctacctccaatgtatagtaactgtacttggacacagtgcttttaaggagataaggttaaatggtatcataagaatgtgacccgtatccaatagtactggtatccttataggaacaggaagggtgcaccaggcatggtgactcacacctgtaatcccagcactttggcagcctgaggcaggtggatcagttgagctcaggagtttgagaccagctggtcaacatggtgaaaacctgtctctactaaaaatacaaacaattagccaggcatggtggcatgtgcccatagccccagctacttgggaggctgaggtgggaggatagcttgagcctgggaagcagaggttgcagtgagtggggatcgcaccactgcattccagcctgggtgacagagtgagaccctgtctcaaaaaaaaaaaaaaaaaaaagcaggaagaaatgccaagagtgcacgagtgtagaggaaagccaggtaaggacacagaaacagagcagccatctgcaagccaagaagagaggcttcaccagaaatcaatccttcccacacctggatcttggtcttcccatctctagaactgttagtaaatacatttctgttgtttaagtcacccagtctgggattttgttatggcagcctttgacgactaatacatttatcatgatcattctttttttttctctatagaaatcctataatactgtttatataatttctaagatgcaccaatctactcaagcgacaatatgacttgtacaattctatggctttgattgacattctggataggaataggctaggaggaagggaaaaagagaatggtatattccctttgtccatgccagctgagtctttccttattgtcttacactgtttgggctgctaatcacaaagtagtatagaccaggtggcttgcaaacaacatcaatttattcctcatagctctggaggcggggacgaactatattaaagtacaagcagatttggtgactggtgagggcttacttcatagatcaccacttcttcttgcttagtcctcatgtggcagaagggtgagggtgttctctgaggtctctttcataagggcactgatcgcattcatgagggctccccgtaatcacttcccaaaggccccacttatacatattgtctcattgggggttaggatttcaacatatgaattacgaggagacacaaactttgagtttgtagcactttttaaaataaagacaaaaatacatgtcttgaagcccaactttcatcttactaaccaaaactccatctgataacccaagctgcaaaagagtctgaagaggtcacgtgaactccatgaggtcatggcctttaacttgtttaccatggcgtcccaacgactatggtagtttttggaaggtagtaactatgccataaacatatgcaaacaaatgaatatatgagctttcttgtctcctgcacaaaaaaagggcatctgattgtcaagaacaaggaagaatatttgtgtatgccattagcagcagcaaacatgtatttccttactgccctttaattttaaacagcattctatatcatgattcaatcatcacatatatctaggtattcatggtggacaagaagactacctattgaaaatctctgattcattttatggaagatgaagtcaaggcctagagaaatgagttgttcacagtcgtatgactagttaatggcagtcctcagagaggactccaactagagtgtgcagacccccatatcatcctgtgaagaacagaaaaagtgtgtatatcactctaatccaaatagcagtatacctctcatttcttctcgtctacttaactggaaaattacatttccttatctttagcttgccaagtgtccttgattccctctccagcttccaagctgtgtcgtggttaggcgagaatgatgctttgcatttgcaaccttctcgggctacatgatatatatattctcatatattttgcagcttctgctttattagctttcagctgtcagcaatgttaagggaactacaaagatatcattgataattatttgctgattttgacttggttctcctcagctctaatatttttaatatatctgagtagaactgtgatttctatattatcccacaggaaatgtcactaaatagatttatgatgctgttcatttcctattacttatgtcaagcctagtataaagatctgtaaggtgactactaatagaaaatttctaattccagtttggattgtaccaaagtatcagttatatttagaagaaaatgcacatgttttgaaaaatattaaacaaccaaataaaagtttatatcgcttctgtcactgacgtaggtgattaataaacataaaatgtgtaaaatattatagtaattttagtgctgaattatgtatttggcagacattttgacatagatatttcagattttccctccaaagaatataacttatcttaatatgaaacttttgagatactaaacaatcttgtgagtgaaagaggaaaaacttgagcaaaacttttcagtctgtttctctctttagcactgccatttgagaatgccaatctgggcaaatgtgggctccccgtctctgtgcataatatcaccaataagtccagggcttaatggacaagaaatcagagatcaagtagcatatagttttaaagaaccattctatattatttcaacagaatatgcaacctgagaagttgatacattgcaggacagccaaggtagactatattcagcctttctaatcaaatcacataactatccaacctcagtggaatatggctttctccctgtacatagtgttcattaaggtaaatgaatagctttcagagcatctctcatggaactacattttatatatatgtacatatcatgtatgtgtatatatccattgtatgtatgtatgtatatatccatccatatatatgtatgcatatggatgaatatatattcttcataaataagaagcccccagaaatgcagcattccatcccaagtggcaaggcaaagaaaacaaaaaagataaacaacagaaaatcaaggtaaagaaaataaaaataaaaagtgatttctctctatttttcctggaaattaacattggccactggttcaaagattagagaaccagggcttggtgtaggaagaattcaacttcagtagagtgggaatcaataactaaccttatgccaggaaataaaagctggactattgacttaattaggaaatttcacctttacaagggtgaaaaatggacatggaagagaatatgcaccttcctttttggaaatataaaattatgttctttttaatgattttttctaagagaggttcaaggagtcacatcattaaaggagtcagtgaatttaatattacttatgacatattgtaactataataaaatacatacttgttctgtgtctggtcctaattccaaaaactggatgccaataagtgtttatattactgagattatttagactgcattacaggtatactctctcatctcctcatgaccagtcttctcaaatcatatgccccaaattgactcagtttttatgtcttaaaccaacatcagaatgtctgttcaaaactctacagatgtaaattctgaagaaatcctaagactatatttatatatataagcaatatgtgttttaaatccacatattcaatactttaagctgtaacaagccttgaaatcctgcgtgtgtatgtgcgtgtgcatacatgaatgtaaaataatgtcagtgaatactgacgtgttagtgtaaagacgaacaatactgaaaccaaaagtataaagatcgattcaaagttcccaaataaagcatacggagtaaacctggctaaaagcattaaaaaatatatatattctggaaactatgtgaatgcacatcactaagaaaaaatattcttttgttttgagcataatgccaagaatttattatatttattaaaatgtgtgcattattttatgtatctattttgattgtttatgaaacaaaaaatagaatgtaacagtatgtgatttaccaatctttaaacaagcaatagcatttctgcatgtttattataaaatactactaaattgtgaaacctctgaaaatatctaatgaagtatatatccagagagaggcattatcgttttaacgtatgtaaagtttattagatgatattttaaaaaatggccgtaagcacaagctactttgttctaaaattgcgtcagataaattttagcacatttttttataagttaaaaggacatgaacatgaaattttctattaaaaatacctttgattgtattttaaagtgaaagtaaaaagtaatacaagtacactacgttttagaagtcacacagtcatgtacagatttgcagaaccaaagagaacaattgaacagacttcattatcagtttcactgctcctatcagttctgtttccaagctatgacagaaaaattaaaaaccgtaacaatttatagatctccaggaaagacaatattctcatccttcgggtaacgtactcacgatatttaagagaaagaagcggcagcaacaggcactgaatgaggcagagttgctctactggattgctagggctttgtcctagtctgttttctgttgcttatatcagaatacctgaaactggatcattcataatgaaatgaaattatttattacaatcatggagactgagaagcccaaggctgagggggcgcatctggtgtgggccttcttcctggggtatactcagagtccggaggcagcacaggtcatcacatggtgaaagggtagagtgggctaacatgatacctcaggtctctcttcctcttcttatatagcctccagtttccctcccaagataacccactacttcattaatccataaatccattaacctatgaatgggtgaatccatgaattaatctattcatgagggctgagacctcacgatccaatcacctctaaacaccacttctctcaatattaccatactgtggattaaatttttgtgcaagtattagaaggaacaaatgttccacccatagaagtcttccataataaaacaccacagactggtggatttaaaaacagaaatttattttctcacaatactggaggttaaaagtccaagatcaagacgtcaagaagggttggcttcttctaggaactctttctttggcttgtagatggcaatcttcctgtttttccacacagtcttcctctgtgcttgtctttttcctaatttcctcttcttacaatgatactggccatattagattagggcccatgctaatgaactcatttaaccctatcgctttaaatatcctttctccaaataaagtcatattctgaagtactgggcattgggatttcagtatagatgaatttggggtgacacaattcagctcataatagcagtggtgaagaaggggtgtcaggtgctctttggctaagcaacaacctcacagaaccgaaatgccttacatggatttattattggactatggcagtgaacaatctcttcaccctccaatatctttggtaaaacacaaaaatactttggaaaatcacaaaatacttggtgggattagatttttagctgatgacttatagcattttatattcaggctaatatggtacttcaaataagcccatttctgagtttgcaggaataactgaaatatgaattaaaacacgattttggtgaagggattaagtttcatggtttactgatatcaggtaaggaattctaccattgcatttattttctttatcctttttctatttatctgctttcccatcctaatactgtcacccttacaaatgaatgccacttctatataccttgttgtcaatatttaaaaaatagaaccaatattttaaaataaatgttattaaagtattaaatattttataatgttttaatcaggaaaatagacacgtttttaaatgtgatacactagggcaaattatatagtaggtattaagtatgagaagtatacagatagaaaatttctctttcctgcccacctatctaagcaaagacagaaacaaatttattatttatcataatcaaccaattagtgaacagaggttaatatgaccatatataatacggagctttataagataatcgggttaatagatatatataaaatagaatatcatatagctgaagaactgcaattttaacaaaaatgttacaatttattcaggagtagtctggagacattcaagtccactacattgatatatagggtgtaaaaaatgctatgtttacttaagcaaatagcactatggtcatgttgatgtctcttctgacaacttatattcattgaatcatggttcattgtttattcagcctttattttatatagcaattatgttaaaattttaattacatgagaagagcaagcattttagtatatttcatgtaattaaaagttagaatagtagcacttatttattaatattaccataaaatcttgaaatttttaaaaacaattacgccacggaagaatttgatttttatataaatgactcctctctgcaccatgaggtgaggatgaaatgtttgaaggcatgaaaacgataagagaatattttctactcattaaactgcatgttgtaaaactgttttctatgatcctttttcattaactgatgaaggataaaagaatattacattttctcatatgagtcataaattttgcacttgttcattttaagtggacatcagaatatgacgtattttatcttgtgtagcttaaaaatgctaactttacctcatccttggcaatgaaatcatgaaggaaagtgaatgtaatcaagggtaaattcatgctaagaattactattaaatctagaatagctgaaattgtagcaatgaggccgttttgtggactgtgtataaaagaaacatttatgtcaaatttaaaaatgaatagtggcatctttcctttttcatttttaaaaagagattttggatagaataaacaaataatttttaaaaaactcaaatgaagtatttggcattagatttatggtcatattcacagcaaagcagctcttgaacttaatccatagattgggaatttaatattataattaggaaattggctgagatacatttaattcaattttatagtcacactaatttctaccattaaatatacatgatgacagaaaatattcattttttaaagaagtacatacctaatataaacagttttagaaattgttcattgagaactttttcatccagacattgaagaaaaattatgtaggaaaacattgttaaattagggtgagtgtcaagaaatgatatctggtataaaataaaataagaaattaagttttaacttgtgcaaaagttataattaaaactagcttcataaactaaattatttaaaatagaactttgattaaaattaaattcataagctttcactttccactatggtgaaggaacagggaccaatttactctcctgaatcgaacaactataaagcagatgaggtgggcagatcatgaggtcaggagttcgagaccagcctggccaacatggtgaaactgtgtctctactaaaaatacaaaagttagatgggtgtggtggtgtgtgcctatagtcccagctactccagaggccaaggcaggagaaatgcttgaacccaggagatggaggttgtagtgagccaagattgcaccattgcactccagcctggtggacagagcaagactacgtctcaaaaaaaaaataataataataatcagacaaaatatatgaaacagggatttctcaatgctggatggtaatcaatgcaaaaaagtaattcctaagagaaattgataaaacaaaggaaatcttatgattactccaatttactttctggaaggagtgtctatccatctgtgcagggagagataacatcaagattagagttcttgctaagttgagaagacaggatcacagataagagagatcaaggtgaccagaagttttgggtaaaacaaaagaatggaggaagtgaatcaagtggaagccaaaaagagaggagatccaacaatttacagcagggtcttctcaaaaatatgagtataataaaattaacaaataaatatgttaaagcatctgctgtaaatataatggttatgcttctgtaggtagataaaagcatgaacctgatgagaaaaaaatgaaaagtgctcaaaaatctaaaatcaaatttctggatgagaaacataaaatatctaaaacaaaaaattgactgaaagagaataacagcaaattatatactacaggaaaaaataacatcagtgaattgaaagatataactatagtaatcatccaaaatatggctgaaaaatattgaagaacaaaaagaaatcacagaatctcgtgactaatggaagacctcattcagtttaatgtatttcaaactggaatcctgaaacaagaagagaaagaagaaaaaaataaaaaaacatagtggaaatcataacggctgaaaaattttcaaatatgataccaattaaaaacccacacaagaagattaaataacacaagcagaatagtgtaaggaaaaccacacaaggcccatcataattgttgaaaacaagggatttaaaaaatgttaaatgctagaaaaagttaaaacaatacataatgtttgtgccacaatgctaagaatagcagctgactcctaatctgaaaccatgtaaacaagaaaacaatggagtgaaatggaatgatggagaggccccattaaagtactaaagagaaaacaacaacattcaaaccgcccaaatttattttaagaaaatgttaaaaaaaagacattttcagaggaaaaagctgagacatttcatcactagtatacttgcactagggacatagtctgagatcaaataatctaccaagaaagaagaatgaacatcaccatgaatggcaaatatgtgaatgaatgtaaaatacatttttatttaaaataaatgatttaaaaaataatttactgtcctaagcaaaataaacagtgcattatggagtttaaaacatatgtagagttaaattgtaggacaggagaacaaagaacaagggggatatagaaggatattgagaatactgcataaagtttaaaatatacatgaaatggcacgatgctatttgtagtagattgtgaaaaattaaagatgtatattgtaaaccttacagaaacccctaaaacagacccgtaaatgatattgctaaaatgtcaataacagagctaaattaggatcataaaaatactgaaattagtctaaaaatcagcaagaataaacaaaagaagagataacaaagagataggcaactagaaatcaagcagcaagttaataggcttatttctgaataaaacaatgttaaagataagtggtctgtacctgcagtatctaattcatacccagtagtcatatgtggctattgagcccttgaacattatcaagttccaactgagatgttctgtaagcataaaatagacataagattttgaagacttagtattaaacataaaatgaaaatgatcttattgataatttatttaatatttatcacatttattgccttttttctttttttattttttaaaatctaaccactagaaaattggaaaatgacacatggagctgaaattcaactcgtattaggcaaacctacccaatgcacaccaattcaaaggtatcatatgtgcaagacctgtgccctgaaaactacattgtttaaaaaaattaaaggagctgcaattaacagagagatatgccctggtaatggagcagaggactccatgtagttaagatctcaaatctccccaaattgatatatatatagaagcaaagcaatcctgataaacgtcccagtagagtttttttcagaatttaaaaaactcattctgtagcaggtatgaaaatacaatgaactataacagttttttttaaaaagactatttttaaaagaaaatgtttagagagctaacctttactcatcaaggtctaatataccttgcatatatgacacttgtattttctataaaaaaagatatatatgatatatatttatataaataaaatataaattaatatgaatatgtaaatataaaaacgtgaaaatgcagaaaaaatgaagggtagacaacatagttttgacatggtaaagaattaaataaaccagtagtataaaactttttcactaaattagtttagtttatggaaatataatgtgctgtaaatgaattaggttttttttgaaaatctttggttcattctgttttatgttttataatatgtattgatctttaacaaaaaatgatgattaaaagtcttttaaaagtcacataaaatgttgctcttttcaaagtgaatgtcctattatgaaagtgtgtcattgacatatgtaacttttgtattacatgaatttttctaataataagagcatgtattttatctgaacactcctttgttagaaattttattatttgagcacaatggagaaaggaaattatagaccagtaatactcaaaagaagcatctctctctatatagcaaatatttgtagatgacagccgatgacagtaaagtatgaatcttaataattggaaaactgttataaattttacaatgtgaagtaggtatttgtaaagctaacctaatccagagaatagccagaaatggtagctaaagaaccataaataaaaagtggcagtcaacttattggaacacctgcacacacagcatgtgtatatacacacacacacacgtacacacacacacacacacacacacacacacacacacaatctggaaccacccaaaactgcttcccttcatattttcttattctctaaagttcaagaacactgtcgcactgaattgtcaaggaatacctatcaactatttcagaattaccagttttgtaattgtgtttagaaaattaagaataaatagagaatataacatatttgcacgtctttgtttttaacccacctatgaggaaatttttgtacaaacttgaaaattcctgtttcttccatagtgggtcttaatgtctttgtcttcaattttattttcctctcattctagagcaatctcttgaaatatacacaacttttgtttttaattttttgctgctgaattacaaaggttttaactccagtccacacctctttcctaacctctgaaattaactgccatacccttggggcgcttctcttcgtaccacactgagtatattaaacgtctttcatcatattctcctagaacactagccttttccttcattgaccttatcacatttacagttgtatattctgttttatggttatttgatttatagtatctacaacaattctgcatgccaagtgaaggcaacactattacgtgtgactgtgtgttttctctccatcatttgtctgacactcttagcacattacctgaaacacagtaaacgtttagatttctctaaatatttagatattatgaattaattagttaagactttcttttcatcaaattaagtttaaagttgtcagtcagaaacattctgtctcaagagaaaataccagaggtcttttgttaaagggcaagttaataaataataaagttaataaagcacaagttaataaagttattttaatattttaatacttgctttaagactttacaaacaggcctcatttcattggaaaaaaaattgtgtcccattttcagctacctataataatgtgctttgaaacgtcactttgaaactcctcccataaataagtggagtgtttcctcatgtttcatggatggtgtgtggacctgcactgattgttcaatagagtgcgataaaagtgacagcatgtcaatttgaagatttggcttctagagcattacgtccttactctcataccaccggaatcttgaaaccagccagtaaaatggtgaggctccctcctgcaggcaaagcagctgtgtggaacagcaatgagtcttcccaactaactgacaatcagcccccagttgatctgacagccgaccactgacccatgaaaccagccaaaatagctctgtccatcccagctcccatttgtccagtctactctgggtttatttgatttaataaataacagagttattgtttgaagtcattgtgttttagagaacagcacaataaataataccgagaatggtaataccaagactgataaattataaatgaatatttgttgaataaatataaaagtaaactgaaagatattttgtatttgtatataatccggtttcagtcagatctcatttgaatgaacaccaattcaaatgccaaaagcaactgaaagcaagaaaatttcgtctatgtatgtttgggtaacacagaaaggagggtagtacacttagtatttagtggagcatttaaaaattcatagaaactagtaaaaatgtatcttctctctcaacactcactatccccttcctccacattttgcttctcatatctgcctgtcaaaaaagcctaaaaactttacctgatcaaaaactagataaattggcagtaagatattgttggagatagtaaataactttgtatctttggttttgtgttctcaagaattcctcacaaaagcaataccatatcttttgaaatttttatttgaaaaattattttttataaaaagacatgtaaattggaacatggtttattttatttttagactgtcagtaagtttcactcttgctactgatattaaatattgctttagattaaaaaaaacaacatgcaagatcttacaaaacaatgaaaattttctctttattttttgtcacctttcctaggccttcttttcttttaataaaaaagaaaataatcaccagaatatttttcagcagttataggtaaaacataattttaacttaactacaagtacacacaagtatggaatatgtcaggataaccttaactgacactgcagggttgttaccaacttttccagtggctaaatagattaacctaatatattcttaaggctgagtgcaaaaatcttggcatagtgatcatcaaagcacacacatgcaaaaatgtcagcttcaattcatcagctaggtaaagaatacaatctattcaattttataggttgtctttgttcataaacacagatgcaatcaagaatcatttccaaaaagtgttcattcaattttatgaactactatgcttatgatcagttcatgaactttaggagaacacttttatgttcaaaagcatgtcttttggcatcgtattttgataaatgatgtattaaaaaaggtagagatcaaaacactggaaaggaccagtaccacagtcacatgagaccagctagagtgtttcttcaaaaactcaggcatctaagaggataagaaacatacttaggatttgtaaatacaaaatggcccccttgtcagcattacaggtttattcagtctttttatgattacagtgacatgtattttcactgtctcaatagcagaagaaagataataaacttaactatttgtgactattctgcttaagatatcaataatttcattaataatttacatatctttctaaaatatctttaatactaagtactcaatctttgcatagtatacaatttatatctatacaggtgcatatatgtatatgtatatgtgtatatgtatatataggtgcatatatgtacatatatgcacctatatatactcagaagaacacttaagtatagcaaaattatctttaatactaagcactagcacattaaatatctttaatactaagcactcaattctttacatagtataaaatgtataactatataggtgcatatatgtacatatacatatgtatatatgtatgtatatatgtatatgtatatgtacatatgcatatatatatatgcacctatatatattcagaagaacacttaagtatagcaaaaaattaatatgtgttgagtaaaaaataaactgagatttataaatatttataattaataattttatgatgataaaattctgcttctttgctcaaattttgaggcatttgttgagggactattaaaaaacaagactataaactctgataaaataagctctgataatacaaattataattataataaagacaataattactaaaatagcatagctaactatatgcctctcatttatattaaatattttcatttttataaaatatatagagaagtaggaactaaattttccgcttattcaggtggaaactaagaaacaaacaagcaaaacataatattaataataataaccttacactaaaatgagtgcttttatttcatgtttggaaaattatttttcctcttctataactctttaatctttctgatcctccatttatcaactgtaaagtagaaataaaaaatcagtctaccacatgggcttactgtgaagattaaataaaatataaaataatgagcacagtattttagcagtcaataaaatagattttctcattaacattatcagtactatttgtatcatttttcatagtatgctctttttaaccacaaaaatttttaaattaaataatacaatcttttatgattccttaatttttacaagtctcaaaagcaaaatacgtttcaattttgattgcctttttaaaaaacatccatggtatcttgcataaatatctgtgaccatcactatgatttcatttttattatttaactattatttattcttatttttatgatttaatggtttattttgtgtctcattgtaggacaatctcatgttatccatggaaataagccaatatatcagtaagaatcttcttttggctaggttaaaaaaaaaaaaaacagaaaaacaaaagagtttgttctctctcacttcaatgaagcatagaagtagatttccaggttagcatagccactctatcgtgtcatgggctccttgtttttgtctgtttaatcagtcttagtctgtgccttcaatccagaaggttaaacagaggataatgcagctgctgacttccatcctgaaggtcaagcggttgtgaatgaaacagggagaaacatggatgaaggggcaaggggaatttcctaggagctgaatcaggaggtaacctttttcagggatttcccggaaatcacttcaaggtctttttttttcctatttttttcaatagtcacctgtagtgtaaaagaagtttgaataaaaaaagacaaaaacttggaaggatacattgaataccacataaaaattcaggagtttgttactaaatacaaaacaaaaatagtgattaagccactagatgttctgtcaaagcagaaaataaatgagagagaaagtgtctttacatagaagcaaaacctgtgcaatacagacagcttttctataaaaagattcgtgaaactgttctgctcaggagaattccataaaaaatgcaagagatgcttctcacagtatgacttctttaatttatttctctggtgagcttagcaacttgtgggtggcatgcaggaaacgaagatgtaacaccgtgtgctatgaatctgtgagtaaaggtgggcaagcaagtagtgatgttattttgagattaagtaatcagctgaaaatttcttttctgcactctgcaggtgtggctgtgagtttttgatttgctcaatgatataggacttcagcattttaaatacagtcatattatagaacctttgcagacagatcaaacgccctgtccatacattctgattaactgctgcttatactgatatcttttatcaggttgtgatggaagaatgttctagcactttttgagttcatttcactgtattttaagttgttttgtcaactagtgacttgctattcttaacagatttggaatcagaaaaactcttagcggcctcttcaagggcatttttttgttcacatgttttcatcagtttcagttaaactacttggtcctgggatattctcatttaactttctgaataagcatttttgcatagtccgtaaacctcttgccaatatctcaattccacttgtcaatcagcaatgtttgccttgctgttatagcaaatgtgacaattactgctattatttaaaactattatagttgttactggaataatgaaattatcttttactccctgtcttccaagaaaagaatgagaatgtctgtaggtggaacattttctctatggctcattttttctctcattcatttagagaatctaacatccttgaggaaataataccccaatgtagagatataatattgtacaagaaacaagctccctactctttgggtctgatagtctagctatggggagaatacaagataagtaagcaaatatttagacaaaatcatttggattagtgacaaaggctatcagaaaataatacaaaattagtatggcattcttcaggttagagagtcagaaaagaccttaaaaaaggttaacatttgagatgctatctgatttacctttcacacataaaggtcagaagaaggatcgttccaggcagagaaaataggcaatgcaaaggccttatggcctggaaggaattccacagttttactgggcataaagttggccaatctgagaccagaatcatgggtgagcaggagagaaatacaagatgaggacagaaaggtgacttgttaagatgtgtgattacttatctaagtgattaaacagtattagcaagggctgataggaactgacatctattttggtcatttatgattagtaaatttgaaacttttgaccaagctttaattagtgaagagggcatgttcctgagttggttaacggctggattgagggtggaaggtctggatgaattgctagagagaggagtttgtagcccgggctgagattattctttctggatgggaattggattttccaaagttgaatacacacccacttgattttaaattaagaaatgctgtttagaaaagcatgaatctaaaagggggagtgaggacaggaactagaaatggccttgagaaaaacccacacctcatgaaggtctgactttttttagtattttcttttgtactatgtgaaaataaatcttatttcacgttatttaacaatttttcctccttcagaataattaattttaatttaatcagaaagttgataaagcttgatatatcttcttaataatagttagaaataaggaaaacgctgtaagaaaatgtgacttaccttatgttttttaatcacccgtggggaaagaatagcattctatcctgcgaagttgaactgaatgacaatgagggcagtgagaggtggtgcatgaaaggttagacaggaacaaggcgatcagttgaaactgaggtaactactgtaagaataactcaagaaggatattagataaaatctcccctttccctacactagtttgtaaagaatggagccaataagtttactggaatcgtacataatatacacttagtgcacataattgcattcagcaatcatttataaaacaaacgccaagtttattttatttcaggcagtggaatagatactggtgtgaagaggtatacaagatcaagatcctgatctgactgagctctcatgctactaaggaaactaaactaacaggtgacttttatagccttgtgtgataggtaaactaatagaagatgattagatggaattcttcaatgagatcccagggaaaaaatatttactttgatcaagttaaaacaacaacaaagaactttatgagatgtgatttgacaaacgagtagaaagatggagggaagagcattacaatcttacagaacagaatgtacaaagaactggccacagtggcacacattatctgtaaaatagttaaaggatgccgggtgtggtggctcactcctgcaatccccgcactttgggaggctgaggagggcggattgcctgaggtcaggagtttgagaccagtctggccaacatggtgaaaccccgtctctactaaaaacacaaaaaaattagccagacgtggtgtcatgtgcctataatcccagctactcgggaggctgaggcagggaggtggaggttgcagtgagtcgagattgcaccactgcactccagcgtgggagacagagtgagactccatcttaaaagaaaataataaaataaatgaaaaataaaggaaatcagaatggctgagatacatggtgaaaagcagggagtgtcaacatataatggttgaaagattagtgagtaatacttgaaaatcatctgaaattccaaagagttcagactttggtccaaatatcttgggcaaagttaaaagattttagcagaaagtcaatattcattttagaaagaagtactacctaacctattgtttcttcttgtaatttttgtgtactctccagcccattgtaaaggaaaaataaaatgttactgcctagcatataataaatgaaaaataaagggtttgtaaagtgatctactctaaatttctttatcttttttaaatattttattttattttattttattttattttattttattttattttatgttccaggatacatgtacaggacatgcaggtttgttacataggtaaatgtggtgttttactgcacctatctacccatcacctaggtattaagccccacgtgcattaactatttgtttggatgctctccatccctccaaccctgaaacaggccccaatgcgtgttgttcccctccctgtgtccatgttgtctcattgttcagttccctcttataaagagagaacatgtagtgtttggttttctgttcttctgttagtttgcttagtataatggtttccagctccatccatgtccctgcaaaggacatgatctcattctttttttatggtcacatagtattccatggtatatatgtaccacatttcctttatccactctatgactgatgggcatttgggttgactccatgtctttgctattgtgaatagtgctgcaataaatatacaagtgcatgtatttttataatagaatgatttatattcctttgagtatatatccagtaatgggattgctgggtcaaatggtatttctggttctagatctttgaggaatcatcatcacactgtcttccacaatggttgaactaatttgcattcccaccaacagtgtaaaagtgttcatatttctccacagcctcacgagcatctgttatttcttgatctgttctttcattttaataatcactattgtgactggtgtgagatggtatctcattacctgacttcaaactatactacaaggctacaataaccaaaacaacatggtactggcacaaaaacagacacgtagaacaaaggaacggaatagacatctcagaaataagactgcacatctacaaacatctggtatttggtaaaactgacaaaaagaagtaatgggaaaggattccctatttactaagtggtgctgagaaaactcactagtcatatgcagaaaattgtaactggacccctttccaacaccttatacaaaagttaactcaagatgaattaaagacttaaatgtaaaaatcctaaaatataaaaaccctagaagaaaatctaggcaacacccataggcatgggcaaacatttcatgacaaaaatgtcaaaagcaattgcaaccaaagccaaaattgacaaatggaatctaattaaattaaaaaactgctgaacagaaacacacacacacacacacacacacacacaaacctaccaccaaaatgaacagacaacctacagaatgggagaatatttttgcaatctatccatgtggcaaaggtctaatatccataatctacaaggaacttaaacaaatttacaagaattaaacaaataaccccattgaaaagtgggcaaaggacagacacttctcaaaagaagacatttatatggcaaagaaacacagggaaaaaacctgaacattactaatcattagagcaatgcaaatttccttgtctttaaagaaatttctgttgggctgtcatccattgctgcaaaagaaatatatatttaggaatcactgcttgattttcagctccctcaaattattgttacagttaattaggttttcccagtctttttgcttatttcacaaacaaaataaaccctataattttttaaaggcatatgtcttactcttcactgccccttgaatttctctgtactataagacttaaaaaaaggaaacttgtttcttaaacctctttaaaattactttttggtaacatagatttttgttgtctaacatccatccacattctgcttttcattttcccagctctattagttcctggtaaattttgtgcagatcacatcatgcagttctcttgggtgcacaagaatcaaataaagaggctcagccacccatgtctattcctctgccttttgcaaaagacaatctttcctaattagcaggtgtctggttggtttaattcccctgtcactgccaagttctgtaccttggctaccaagaaactgtttcttgaagagattactttctttgactattactgtaaaatacataattactagctttctttaatctgattaattttctccattgatgtctaattgtttatgtttctctactttttggcctgagaacacatatatagtaaatttgttttaaatcgatgtgttcctgaatatatactttgtaagagtaactgggcaatacatatatttttaaatatgtgtttcccctgcctctacctacccttatttaatcatatatttattgtctctctggttagcctaagatagccattgcgttataattacattgtacacaagaaaggttctgttgagaaaaaagaggttgttcactactccaaaactcaaaatttacccgtagcaacaacgtcatcattcagggtgatatagcaccaatatatgttcctgaagaattaggagagtaaataaggatggtcaggcagccagctttcccggtttgaactcttcatttccttcatggtgtgtatgcaaagttgagaattgtcagacctgacttgtaattccctgtggctgaggcactgttgctagggacaggacaacctggaccaagagccaaattgagtgtatggcataaactcacaggggtctttagcatgaacaggaggtgacaggaacctgaaccacccaaagtcagtgtctttgctctgactgagctgagaaagtggagatggcaggctgaccaagcacgggcatttgaagagcttgccagcagagtctcaatggtttctgacaatgtcaagcatggcccagtttctgacaacgttaagcacggccccagccctgtgctcccaaaacacaggaacagtcaagaatctcccaagcatttggggttctccgacatggctgactgcaaagaaccagcgtttgacacatgactttgataagactcatgaacggcccctgttttacctaagacaagtccagacaggcctctgcaactcccattttttgtattataaatgattacttgaacagtttttcaccactaaccaatctagacaaaatgccttctaacgaccaaacaatagtcaggtttctctcctaccctagtctcctgaaactttattccattttaaacattgtaatgctaaacaactcttccttaatggccaacccccacccttgccccagaattggttgacctacctcaggaaaaaatatctcctaatcaacggccctttcgtactaccacgtatccaactctttgacaccaggttatttctagccttatttaccactccctgaaaaaggaagccccttttcaacgccatgtgatacagttgtagattatctcctactgaagggtcttcatattgcaacaatcccctgttcctattgcagaagtccttctgctctattaccatagtcctcaatcctttattgaaacaatcattttgagtaaggtttctttttactgacatccaaaatggtttgcatttaacagtacgtactcaaggactagacctggagattaggcgagagacatgcctttcctctaatgactcaaagtcataaaagttcatttctcatatctctaatgacaactgtgagaggagcaagggaagatggagacaccttaagcatgaattatgatcccaaagacattaactttaacttctagattctatataaattattggatcaaactaagttttaaattaatttttgctaaaattatttttatttcttctatacccaggtttatcatgaggagaaagctcatcaaaaagaaagtttagagaattaaataaaatatttactctgtaaatctgagtgccatatgaataaatttgtgagctgactagtcacataaattttggaacttgaaagttagtccttttttacttagcttctgtttcttattttatgaatcttttcctgagtccttcaacctagccttttatatatttcacttattatcttgctttgttttcaattttatttttttgatggtttaaataccttgtttttctgaggcaatttctcgttaacagcaaaataggaaacaaaaacggcttcctgtgaaaattattttattcatttaagaaagatgagataaaggaatctatcaccttttgcctcattcttggtccctttctctaacaatcttgtgccttgctcttagtatattctagccacattattatttttttatttgattttgttgtgttttgtttttagttagggtttttttttggtctattttcatttggccgtgagggtgctgtctacttcctaataaaaacttatatgtcattttaaatatttttacataaacaagaagtagaattttgtttagctctatgatcggaaagattttaggaccactataacatttaaccaatttcctggaatttcattttcaaaaaaatggagtataagctgattttataatatattcacaacattgtttgctcagctaagttccttccaagccctgtaaattgtccttgatctacaaaagcactcttcttgattatttatgaatgttatttatacagtaaaatgcaatggcaatgccaagcaacctactttacagtaggttaaactctacagagaaaatgtatttctaaacattcaatcttgacaggcatacattatacagggacaaatatcaggcatgagataattcatgctggtaattattttaaaacagcaggaaatagaacattatcgttacagaaatttgccaggagaagcttgatttttaatagatgatgtggaaatacataatgatttaggatagaacatttaaaattttcgaagacaaaagaaacaaagtgggtggtcaaaaggaaggttgggttggattgtagaggctggagaaggcatgctgagacaagggcgtaacggcagcaaagtccttcagaagcgtgagaacaggtgtgtaaggggctacacaaaatgacttaatgaagagtaaaagagaaagatagcagaaggggaaaatgtggtcttaatagcaaatgaaagctgttaaggaaatttgcacacagtagaattcatacaatgtctatgcccactaaattgcagactttactctgtcagacatggctgtatttgttacttaacttgaggcaattgaaagtttgcaaaaacaaaaacattttcctctcatgtcccatgctcactgaggggatatagaaaaccgtaaagctcaaatggcacagctcaagctctgatcttttctgaagatgatcttttctctacctattaatctttcttggaaatattcacctagagaggaaaaatgctttttcttccatcacaaaagaggcaagcctttgaaaaccagtctttgttcttcacaatgtgaacttgtataatgtacaaagaagtctctcagaagcccataaacaaaagaacaccttgctgtacacaagttatctgtttaactaagagccctttcttctcctctgtcctgatttaaagtatttcaatgtgccacaaaactaagatctaatcattgcaacacttggcaaaggattcccactgagattttagaaaaaagcaacatacaattttatgttaagatgggctccaaaagcacattggaaattggttagagattgtttacttttttcattaaaaatatttaagaaaattagattttcagtgaaagatatgcactgcttttagaaataatgtttataagttatttgccaacataaatattttcaaatgaagttgtggaatgtacatgttaatccatatagttgacttgtactattatacctgaaccagaagcactgatcaaaaacaattgtttatatcaaaagtatactttttttgttttcttttcaactgtgggaagaaattttgacttgtggaacagatagacttttgctatcatcctaagttgaaagttctagcctgccaaaaatgtaaagcattttgccctatgtgaactttacccatccttgtttttgtgtatctgtaatattcatataatatatacaatatatgtaattttagaataaaaaggaatgaattactgatatgtgctataagatggataaaacttgaaaatattataagagaaagagaagtcaatcacaaaaagaccacatattgtataatttcctttgtacataatgcccagaatagccaaatcaataaagacagaaactagatttgctgttgcctagggatagaggggaggggaggaagtgattactaatgggtatgtgatttatttgctggctgatgaaaattttctaaatttaaaatgtgacaatcgttatacaactcagtgaacatactagaaatcactgaactgtacactacacatgggtgaattttatatgtgaagtatctctcagtaagaatgtttaaaaattatgagtacaggaagtcattttggccagatgcagaggctcatgcctgtaatcttaacattctgggaagctgacccaggagggttgcttgaggccaggagtttgagatcagcctgggcaacatagtgagatcccatcttcataaatacataaaagataaaataaattagctgggcgtgttggtacgtacctgtagacctagctactcgggaggctgagatggaaggatctcttgagcccaggaggttgaggctgtggaaagctgtgctcaggccagtgcactccaacctaggttatcgagcaagaccttgtctaaaataaatataaacaaatataaagaagataaaagtaatttgaagtgaataacccaagaaaaaattacgcaacatttatcaaaatgagatatctcattaagctctcatctaagaaactgaaataattaaaattgcttttgatattcatataaaaatgaacttgtactcacacataatgaaaataatactaaaaataaatatgtcacaaaggagaaatccttttagatgatgacctagatgatagaagcagaatgaaaaatagtaatgaaagagtagataagacataaacaaaatctctcctttcctctgccctgctgtatgtgtggaaccacaaaatacagctgtggattcttctcccacacgtgaagagagaatgaagctgctcatgagtgacctttagaatcaaagcactctgagtatgagagacgcccttgaatgatgtgacccttcccttaaatacctgtaaagaagataactggtcagtcaaatcagtaaactgcactaagaaaaagcatgtatttacaaacacacactcaaatacacacacagagagacacacacagatggacacacttttttttttttttgagactgagttttgctcgttgcccaggctggagtgcaatggtgcaatctcggctcaccacaacctccgtctcccaggttcaagcaattctcctgcctcagcctcccaagtagttgggattacaggcaggcgccaccatgcccagctaattttgtatttttagtagagatggggtttaaccatgttggtcaggctggtctcaaactgattacctcaggtgatccacccaccttggcctcccaaagtgctgggattacaggcgtgagccactgtgcccagcccattgctttgtttttgtttttgttttacatagtgttatgggtataatagaattccctaaaaccaactattggacccagagggatgcatggaacccacctttaaaacccctgctctgcacactggaaaagtaggaatagctaacaatccagagacatagaagaattattcttacaaggtttcagtttggccaaaaacaaggcttttgggggtgttattggctacaagtaactgaccacatgaagtaaatggagttaggaactaggtgtgcaatgtagaccaacacactggaacatagggcatagactgagagcaacagaggactacaataggaagaacagagtcaatttaacctgagttcctattgaatgtttgctatttaagagttgttaatcacaggttttaattggtttacttctccagcaaaagtagaaaaatatctataccatatttttgctatcagtaccaaataaaattatgtatgtatagcaggtactacagtacctagtgctaagtgggtacacagaataagattatttgttttgtgaaaaagcctcgatatttcagaatagaagcataaatagtaggacttgagctctacctataaaattacagggagtgttaaagcctaaatcctgagattaaagagagccattcatcacccaaagagactagcaagtggaatttagttgcagaaacacagaaagttagagtaataggttgtgtggtactgacaacaaggctgtcttcattcagagttatcttctgagacagtggttcctttcatatgccatagagggtgaggtcttggattttcctgaagatagagttgagcttacattagagggcactttacacacccaaacctaccaagagctgagctgtgcagagtcgaaaacctagtagcttgtggctggacgtggtggctcatgcctgtaatcccagcacttcgggaggctcaggcgggctgatcacgaggtcaggagttggagaccagcctgaccaacatggtgaaaccctgtctctactaaaaatacaaaaattagccaggcatggcggcacacaactgtaatcccagctactcgggacgctgaggcaggataatttcttgaacccgggaggcggaggttgcagcaagatgagatcatgccattgcactccagcctgggcgacagagtaagactctgtctcaaaaaaaaaaaaaaaaggaaaaagaaaaagaaaacctattagcttctgatcatcactggtgggctggtgatggcttcttgagtcaagaataagaattaatctgttacctgtagcttgtgacactggaaacactatattcgtttcactctcatttatttaccttaatactggatgtacacagggatttggaaggcgttctgagaagatcagaatgattaatggaagcaactcactgagttatgaagaaagattgcaggaagtaaaaatgtattgtttacttaaggattagttgtctaaagatatgttaatagtctcccagttcttgaaaggtaaaaataacatgctgtccttcataagcaaatttaaaattactagcccatcaacagtaaaaacatgtacttaaagttatttttctcagggatgagaatagcttctagcaaattaaaaaaaaaatcctaccttcaattcctctgataaacaatagaattcatgtaatgaggcagcacggatgatgctgcttgtaaaagaaaaaaagataaacactctaactttaatagagactgtctttgatcttttactgttgaaagttttttgtccccctcacaccaactaattcaccaattctctgattctccaacaccaactaggtttcaacaattcaattcaatttcattctgacactatctgacactagagtgtcagatcatacgagttaaagggtcaagactgcctccacttcggacactagttacagttactacctgtgcttctgactaaatgactgtaaattgagagttcccatgaccccatcttcacatgtgattatttgctaaatggcaacacagaatttaaaaaaatctttacttacattgaccgatttattataaatactacaactcagaacagccaaaagaaagagacacacaaggcaagatgagggaggaaggaaacgcggagcttccacgctctttctgggtgcacacttccattatttccatatattcaccaacccagaaactctaaaccctgtcatttaggttttcttcagccattggtgaatagcccaatctacagatcctttcccattcctggaggttggggaaagtagggcttatagttaaccaattcttggtctttttggtaatcagcttccgccctgaaggtatgtgcccactaagagtttcctcatcagggcataaaagactccatcatccttttcactgagaaaattccaagggttttacaaattctgtgccaggtagcagggacaaagactacatgttttttttctttcttttttttgagatggagtcttgccctgtcacccaggctggagtgcagtggcatgatattggctcactgcaacctccgcctcctgggttcaagtgattctcctgctccaggcccccgagtagctgggattacaggcgcgtgccaccacgcccagctaattttttgtatctttggtagagacggggtttctccatgttggccaggctggtctcaaactcctgaacttgtgatccgcccacttcagcatcccaaagtgctgggattacagaagggtcaagtgttttcctatgataccacaactatataccaacccacggaattagattatcacaaacaaggtgaaatactaggccaccaattaatatacgtcccgcgcacacacacacgtatcttgttgtagctccccatcaaatgttcacgtttgcccatttcttacagtttgttttgaccatatagccagatttctctgttccccacagacacttgaactttggcttatccccatacctgaggaagcgctaagatgcagaatataccctgttcattaggtcatcccaagtatcagctgactaccccaggtacatttcctgtcgtggtgcctgtcatgcgatgtactcactcctcattgcttgcctaatttccccttagacatttctgcaaagttctgcctacttctataaaagaaagacttttttttctgtttgattttgcatttcttttcattggacacttcttaaaacaagtgttaataatgctaaaatcacttcaaatgtcaataccagcatcaagtctatccagacaaaatgaaactaataattaaacaattatatcatagacttaggcaatggaaaattggcaatctgaagtcttttgaatttataaaggtgctttttacaaactgggttctacagtgaaggaaaggtaaaaatacatcattttaaaaataacatttgactacataccagggaaaattttcttaaaatttcattacttcatttttatgagttctcacttacatagaattacattatttttatctcatctatagctcacttatataagccaaatcagacatcatcctgcccaatcttttctaaaaaatatacataatttttattagaaaataaaaatatgaaatgcttcacaaatttgcatgccattttttgcaggtatatgctagccttttctgtattattccagttttagtagatatgctatctacttgaacacagaatctctttttattattattacaaggatagttgagattcaggggctacattgagaggatggccagttaatcacctctttaaaataaaaataaatctttgcattaccccccaaaagccatctggatagggaaagaatgaattatgtcatgaagttgacattttttaccattggaggtttacatgataaaacaatatggtgaaagagaatgttgactttcatgtggattttagttgtgtaaatggatttagcaactttatttgaggaaccagttccatttactaaactaatatcaataagctgattacttgaaagttaaatatattaatgaaacaaatatattttctgataatgtttatttaatgaccacaattttacatgtcttacaaatacaaaaacaatgaaaaaatacctccatttctttttgtgctttcttgttcttattatagtcttttctttaaaacaactttgtccaggcaaaaaagttaaactagatgaaaaatccacagtgttacttttggacttagtaaagccactgtgcattgtttgcaccaaaagagcattgtatattgatagcagaaaacctagaatcctcattgtaaatggaaacataagtagaaaaacaatatcatactaatacatgtgcctttgattctactgcagaattaaatagaaagcatgaacaagattccattgcatagctaaatagttagcatgaacaagattctactgtatagctacataagatgcatgaacaatgaacagcaaaaaatgtttgtaaactttataaattattgatcagatgtgaggtggatctggctgccacctgggtcaccccattgattgccaggttgacctggttgatccagctggctaggccagtgtcccctgcctccttcatggctctgcgttgcaagctcatggaggatgaggatgatgtgttcattaaaagactgttcttctgtttagggtataaatgattcattactaaaatgtatgaataaaacaaatacacaaaaagtcaattgaattgcataaatatttctcatacaacatggctaaaaatgtcctctcttcctaaatggactttatgtcctgtgaaactcttccagctcatttacatgcataacttcaccactggttgtaattcacgtattattgctaaatcaaacagtcattaaaaacatatggtcagaaactaatttaagaaagaatatttgtcttttttatatttttcaaaagaatattaggtacaaagtaaaaactcactgaagcttcttaaatgagtgttattttgaaagttaaactattcagatttattagtgattctgtcagttgtttataaaatcacacattctggtttcaccttcattctaaatttttaacttaaacaaaaggagcagctcttctgaatgtaaaaaatgtgctattataaaccatctgtatttttgttaatggtgaaaaatataaggaaaagtaaaataatttgcatatagatacagacacatttcattctcacttttaaataaatgggcttattttggtcagttaattcactgggagatattctgagttgtgtatatcaatcaactctaatgcaaggtatcttgcagaaaaaaaatggacccatctacctttcactttgcaggaagaactggagcttagatggactctttgatcagaagatcaaaatatttaacaaacataaatgcatgttctggacattgcagtacctcacattgctataatatcaggatcagcaatgaactctttataaccagttgttttcaaatataagttaaatatttggcactcaaagatagtccacaagcaagaatatcagcaacagttgaaaacttatcaaaaatgtaaaatcctttattaaacttcttaaaaatgcctctcctgcaaactactaaattggaatctgcattttaacaggcctttgtatacatatgaaatttgagaaacaccaggttatgtgctttaacagcacagagggatgctttaaaagggaccttcttgtgtatggaattgaactagacgttcaattggttcttctaatcctgagattatatgggatctctgacgggataaaagaaatgaatcttaaatttttacgtaatctgccactttcttgtcccataacttctctaatttgaaggaaaatattatttcattcatttgctcttctttattagtattttctctcaggaaaccaaataaaaaaagtacaaaaggaatttctcattttctgtcattttcaaagtataagtcaaaccttgatccaggcagcaaaagacaatttaataattgacagccagtttaaccagagagattttgcctttaatatcaaaaatacaaagccaccaatttcttcaattgtcaagaaatttttattaacattggcccacagtgaattctttcatacttcttcctgttttccattcccaatactattccgctggggtacacgataatgattatcatctcaattcccacaatactacctaactagtttctgaattttcacactattctctctgatccattttgtataatgtagccatagtaaaatttctgaaataggaaactgatcatgttatcccctgcttgaaactctgcaaacgttttcatttttaggaaagagctcaaactctgcaatagccttcagtaaatatccctggtgatcataacttcgctctcctttggcctagtctctttgcttccctctcttgtactctgcactccgcactccatgcatatcaaattcctgccactttcacaagctcaccttttcagatttggtatcctgctacttcaatttcactctttccttatattacatataaaataatatatactgtatatgggatgtccaatataacacatagtttcttttctcatcctaagtgccacttcaactaggaagcccatcataatagaatacatcttatgtagatttcatagcaccctgcaattctctaccttcacacatactgcactatattaaatcacccaattacttgtagaactttgtgaaaatattatttacctaatcttagcagattacctcttaaaaactgtccattttaataaaaacctgtctgatttaggtgattatagaacaacgaataaaaatcaggtaaactgcaatgataaaaagtgaacaggaatttgtggcaggactaaacaccaaaagagaggagaatatcaaaataaaatagaggcctagtactgattatctggagatagactttatggagacagttgactatcttttgagacttaatgaaatttctttgagtttcctgagctatgtcttatgaaaaactcaatacctttctccaaatgctgtatgaattgcctctccctgcaatttttgttcccgtgtctgtttcctagttccttcttctgctgaaagttataactcttttcacaactcttttctcttagctttctgtcaacccatttgtaaaatgtggctcttatcagtagatacagtatattttagaaatttggaaacaaccaatgtctttttcactgcacaacttaaacaaatattaaatatcttattactatgataattattattattttgcaagaactttgttcttgatgaagaattgttctaggttgggcatgttcgctcatgcttgtaatcttaacactttgggaggccaaggagaaaggatcatttgagtccaggagttcaagaccagtgtggataacatagggagataccatctttacaaaaataaaaaattaaaaagttgtatcctggtggggtggtgcgtgcccatggtccaggctacttaagaggctgaggtggaaggatcacttgaggctgagaggtcaaggctgtataagctgtaatcacaccactgaactccagactgagccacagagagagaccctgtctcaaaacaaacaaacaaaaaaaggatttctataccaattatttggtcaccatgccaatctcatggactggaagattcaccattgttaaaatgttcatattacccaaagcatctatagattcgatgcaatccctatccaaataccaatgacattattcacagatgtaggaaaaaaaattataaaatgtatatggaaccacaaagacctgactagccaaagctatgctaagtgaaaagaacaaaactagaagaatcacattacctgacttcaaattatactacagagctatataactgaaatagcatggccccggcataaaaacaaacacataaaccaagggagcagaatagagaacccagaaacaaatctgcccacctacagtgaattcattcttgacaaagatgtcaagaacatacattggagcaagaacaatctcttcaataaatggtgctgggaaaaattcatatgcagaagaatgaaactagacccttatctctcatcatatacaaaaaatgaaatcaaaacgaattaaagacttaaatctaagacgtcaaactatgaagctactagaaaaaaaaaaaaaaaaaaactttggagacactctccaggccattgatctgggcaaaaatttcttgagcaatgccccataagcacaggcaaacgtggacgaaggggatgacatcatgttaaaaaagcttctgcacagcaaaagatacaatcaacaaagtgaagaaacaacccacaaaaatgggagaaaagatttgcaaactactcctcttacaagagattaataaccagaatatatatataaagaactcaaagagctccataggaaaataatctaataatccagtcaaaaattgaaaaaagattggaatagacatttccccaaaaaagacatacagatgacaaccagacatatgaaaatgtactcaacatcattgatcatcagagaaatgcaaattgaaactgcaatgagatatcatgtctcccttgttaaaatggcttttatccaaaagacaggtaataacaaatgtttgtgaggatgtgaaaaaaaggaaacctttgtacgctcttggtggaaatgtaaattagtaaaaccactttggagaacagtttggaggttcctcacaaaactaaaaattgagttaccttgtgatccaacaattcctctgctgggtatatacccaaaagaaaataaatcagtatatcaaagaggtatctgcactcctgtgtttgttgcagcactgttcacaatagctaagatttagaagccaaccaagtgtccatcaacagatgactggataaaggaaatgtggtacatatacacaatggagtaccattcagccataaaaaatgagattcagtcatttgcaacaacatggatggaactggagatcaatatgttaaggaaaataagtgaggcacagaaacacaaacattgcatgtcctcgcttacttgtgggatctaaaaatcaaaacaattgaactcatggacatgagttcaagagtaaaaggatagttaccagagactgggaagggtagtggtataggtggctgagggagaggtaaggatggttaatgcgtacaaaaaaacagaaaaaatgaaaaacgcctactatttgataacacaatagggtggctatagtcaattatatgcttaaaaataacttaaggagtgtaattggatggtttgtaactcaaaggataaatgcttgaggggatgaatacccccattctagatgatgtgcttatttcaaactgcatgcctatatcaaaacatctcatgtactctataaatatatacgtctactatgtacccacaaaataaaaaataaaaataaaaatgaataaatacttgaatggattcacctaaaaagagcatttccttttagggaacacctatcccaaaaccctatcctaaacttggtggcatcaaaattttcaaattttcttccagctcagaaaaactatcctctagtttttccccatggaaatgaaaacattcatttgataaagcaaatatctatactactggtggtcttatttttgttcttgttatgatgtcatatatgtcagagttacctaaaagatttagaaataataatcagaatgtaagcccccacgggaaagaattttgtgtcttcaatactgcatccccattatctataataagactaggcaaagtatagtgatataacaaaaattataaaatgaatgagtgaaagaattaaccttcctaatctaacaaattgttggggttcttcatttgataaccactagggagagtgcaaacaaaattaacaacaccaccaccaccaacaccaacaacaaaccatagaagagctgggaagggttcaaataggagaaaaaaaaacaacaatatagggaaacaatggaaagtattacccatttttcccttctctaaaagacagcaactgtctttgaggtatttgggaaagcataataaacagaggagagacttagaatatgagtcccgagactgccaagggtaaaatttttagttgaaaagcatataggtctccaagcctagatctttggagaaaaggtcaggattttgggacacaaatcaatttttaaaaatctgtcaaatgtacataatattaataaatatttacaaggttgcaatattctggatgtttctgcaaaaagttgattttgattttttaatgctaattaatgctgaaagagtaaataggaggataccggatatttatattttgatagctgggagcaggaccagctacctaatttgtgaggaccagttaaaaaatagaaatgtaggcttcttgttaaaaaattattgggaattttacaacaccaacagtagcacattaaaccacgtataagacccttttgcatacccataaagctgattgtggttgggaataatactaagtgcaatgaaatatgctgaaatggtggtcatctatgtctttgtgacaaaacatttttgacacaaaattatttacctaaacatctacttgaataatagtttatgttatattattttgcctcagcattaacttcctttattactgaatttaactgtatctttcctctttggaaatgggaaaattagagacactattagatgataacatcttctgattaaaagttccttgatgatcaaagtaatgaaaaaaaagataattaacatttatgaaccaattagtatgtgctagatgctacaactacataggctcattaatcctgaagtaaaaattttccagttatcagcatacgttcatgtgtaattaatgaagtaattaacaaatgtaagtaacttgtcaaagcatcacacaaccaatagatgactaattacgaatcaataccgagatttgtttagtatgaaaaaagagaaacttctctaattccttcttagagcattctagttgtctcttctttttctcctattccccagggaaaatgaagttatgaatatgattgattatatcccaaggcattaactgtgtattaaaaagcatacatttcttattttctctgttttttccccttgtgatacacaattttttgatacttcctctctctctctttctatttttctctaaattgcataaattcagatgctcagatttagatctacataagtgggaaacttcctttatgtactaaacttaaacgtccttttactgagctctttattgctgtactgagttcttgcaaagcggttgtcaaaaacctgttctgttattgcatcttgtgttctcaggtagaaaaatggaatgatgtgtaaggtgatgtttatatagttttgcatctttattcatagcatccaacctcatacttaacttccctttacatccatacggtgtgtgatacttacagttttgtttttaggattaaataatgtaatgaatgcatagtgcctgacacatccattctacttgacaaaatcaactataataataatgatatatctatttcagggtggaggacaggcctatgaaaatacatatttggagcaattgaattagaaaaaaatcattgatttgcaaattgaataggataagattatcaaagttagctttgagaatctgataagaaagagaataagagatacacatgacatttcaaagtttgaactgtctgatgatagtcaattacataaggaaagctaggccttttcaactagaaatgattcctggaagaattttatcaacttgacatttataaaagctatatttgataatatatgacaaaatatggcaaatattctagtttcttgtgtctctataaaagctcaaaatgtgactttcactcaatgaatatgtttctatggaaactaacataaataatgtattatattattttctaatgatctagcttagtacaggactagaatttcaaaggctgaaacaaataaaatttatttaatatcttaactttgtcaagcaagagctgaagacatgggtcacattgaaattcttcttaagatctcaatatgtcagtattctatttgttgaataaatggtgacctatatgttttaaagaaaatatatgtaagaattaattgacatgctattgtaaaaatgtatgagttttacttgaattctccttcagacagatggctatttcattttaaaaagacagaggacacaggagtgcatggggtgagacaaagtattttattatttttcctccaaaaaagtttggattttagctaggtacttagacatgtgcagttcgagatccaaagttcagcaccataaatcttagagcagaccatctggagctaaaaatatttaagaacaggtgttataaattgcccatttatgttcatataggagcaagatggtagtagaaaatctgctttcaagtagaagtacatcttgatggacatttcagaataaattatctgccaaatatactcttaagtgtgtaaatagattttgtcatataggtgaggttgcttgggagcatctgtttacattttggaaatttcaagttaagtttccattttagaatatttgttgcttgatagatctttttacaggaaatatttaacaggagatttttcttaaggtttcttttctttgtaacataaagctattttgtcagagaataattaatatgtcttcttacttattatggcaggtatacccaacaatcccttatttgcaaatatctttattttatatacaatcacctctttgcattcataggggattggttctagaactccctgaggatacacaaatccgtggatactcaagtccattatataaatggtgtagtgtctgcatgtagccttaggtgtactatgtgtatagtctttaaatcatccccacattacttataatacctaacacgatgtaaatattatccttgaacaatgtggcaggtcaggaatgctgactccccatgtagtcaaaaatctgcatacagtttttgactccccaaaaacttaactattaatagcctactgttgactaggagccttaccaataccataaacaattacacatattttatatgttatatgtattatatgctgtgttctcctcataaagtaagctaggaaaaaataaaatgttattaagaaaatcatgagaagataaaatatatttactattcattaagtggaagtgaatcattataaaggttttcatcttcatgttttcactttggacagactgagggggaggagggaaaggaggagttggtcttgctgtctcaggcatggcagagtagaaggggtggaggaggcaggagaggctggcaaactcagtgtaactttacagaactcattgtaatttctgtctaacttttgtgcatacagtactaatcctttccccactgtttgctttactttcagcgtctgtgtcatgtaagggaccatgtcataaaagaagtaaaaagcagtcttgaagaatcggaacaattctgctagattctctaatgtcagtttgtttcctggtactgctgcttctaattcttcttctcatcatctggcactggctcaaaagcacgccacccatctccatcaagtcatcttctgttaattcctctggagtggtgtctattagctcttaaattttttcaagatccaaatcttgagtcccttccccctctacctttttttttttttttttgccatatccacaatttctttcatgatttccttgattgactttattgtaaattagatgttttagaatgcaaaacatctggacacagttttccctaggaggaatttattattttgggcttaatgactttcatggctttttctataacagcaatggcatttttaatggtgtaattctcccagacttttattatgttttctctgtgagtgttcctttttatagcattgagaatcttttccatagagtatcatgcataatgagctaaaaagtccttactacttcctgatctcaaggctgaactagagactttgggaaaagtagaccccttcgaagtcttcagagatgatctcacggggttctgggtgaccagggacattgtctaatatcaaaagaactttaaaaggtagtcctttgctggcaaagtacttccagacttcagagacaaagcatcaataaaaccaatccagactaaaaatttcttgttgtccaagtcttcttgtacaaccaaaaggctagcagctcgtatttatcttttctcttcaaggctggggaattagtagctttttagatgagggcagttctgaccataaacccaactgcatttgcacaaaacagtagagttagcctatcctttcctttgctttaagttgtcatataatgactttgctttttctcaaattatgttaaaatatagaggtgtgtctttttgtgtgtgtgtgtgagatggagtctccctctgtcacccatgctggagtgcagtggcgccatctctgttcactgcaacctctgcctcccgattcaagcgattcctctgcctcagtctcccgactagctgggactacaggcatgtgtcaccacacctggctaattttttgtatttttagtagagatgaggtttcaccgtgttagccagaatggtctcggtctcctgacctcctgatccacccacctccgcctcccaaagtgctgggattacaggtgtgagccaccatgcccagccaggtatgctatagcaattttggcctcgtataaaaactacattttcaaaagaagatgagataaaagggtactttgcaaaaagtgcaaggttttcacatctgttggcataaatgcagcaatggcttaataaattttcttttcttttttttttttcaatggttcttacactagattaatttatcttgaaatactgggcaaccgcagctgcagacttcaacatacatcacatatcaaacaaggtaatgttttcttgtaatgtcatgacttttctatgattctcaggaccacttcaagcatcactaacggcattttgtatgagtctcacgctgttaatcaaggttcacagtcttgcactaaacatgaaaatatgtgagaaccataggagatcactttttactatagtacacaatttactggagagatgaactgctcacatggagattattaacattgcatggcttttcttttttctttttttttgagatgcagtcttgctctgtcaccaggctggagtgcagtgatgcaatctcggctcacggcaacctctgcctcccgggttcaagcgattctcctgcctcagcctcctgagtagctgggactacatgcaggtaccaccatgcccagctaatttttgtatttttagcacagatgaggttttaccatgttggccaggatggtctcgatctcttgacctcgtgatctgcctgccttggccttccaaagtgctgggattacaggcatgagccaccgcgcctggcctcattgcatgacttttaagctgatattggcaacacttgagctcaccacaacagaaacaggatgtggctaccaaattattacagtagtacaatatgtactacagttaattttatgcagttgtaatttaatagtgcatcttaacattggtttacatttatctcaactgtgaatggcaccatgtagatctgtgtttatatgtgtaatattttataaactttaacttcttatcataaaactgtgtctattttatggtagtaaatgataaaacaagtaagtatctacattgattttatgcacttataacatacctaactttttcttatttttctctatatttctaggctatgcagttcatctgagttttttcttcaaactgtggcaaatctcaaaaaaaattccagtatacttattgaaaaaagttttcacagaagcaaacttatgcagttcaaacgtgattattcaaggatcaactgtcattgctatattgtatggtttaggaaataataattttaaaagactttaaaatattctgtacagacacaacaattttttgagtatttttgattcatggttggttgaatttacagatgtggaatccattgatatggatggatgagcgtacttccttttcctttctacctcaaggaagaatatgtatatttattgttgggaaactttttatcatcttaatatatagaaagactttggagttgggtgcggtggctcacacctgtaatcccagcactttgggaggctgaggcaggcagatcacaaggtcaagagatcaagaccatgctggccaacatggtgaaaccccgtctctactaaaaatacaaaaattggctgggcatggtggtgcgtgcctatagtcccagctacttgggaggctgaggcaggagaattgcttgaacctgggaggcggaggttgccgtgagctgagatcgcgccattgcactgcactccagcctggcaacagagcaagactccatcacaaaaaagaaaggactttggttggcagaactgttttatttcctcaacaacaccattctccacataaggtagaaaagccaatctatattatatgctcatcagctaatatccagtgaatgcagagcttgggaaaaagaaacgctgctcttgttttatcccgcaatcttattgctccaaaattctgctgaattattctactgcccaaagtctaattataaaaattattaaattttatttatttctacgcacaaattggagttttgtcatttgaaatcaaagacttcacactaattttctatttaaataggtactgtgccctgctatatggaaagcaccatgctaggagttgaggtttgaatttacaaagacaaataaaacttagaattatccatgaagaatttgaagctaggtataaaaagaagaaagctctaaattaaaattgagtatgaaaacatccaaagttcaggaatataagaattgctattgaaacacagaaaaattatataaatacgattttctgagggttttctgagccagggaattatgtgtcattcttcttgttcttcactttataaacccaatctttttaacaggttttgtccattctatgtcttgagccctttggaattttctttatttcattttctttccttttttaggatgtatattgtgtatattttgcatataagtaattgtaattgtgttgtattattcttaaatagtatttaagagcatgacctcgagagtcagatcactagtgcacaaatcacatgtctaccacttagatattttatttggggtgagtcttttaaactttctgcttttttgtttccatgttggctaaatatggctgaaaacaatacttatttcaaaaagttagatctaaagaaggtgcattatttcagcatccagcaaaatagctggtatatagtaagagctcaattaatgttacttattttgtgttattaccacagtttgttacttgtttcatattctcggattccaccctcattcatccttcacccatcatctggacttactttaataaaatatacatatgatcatttcatttatctacctatagctcatcagaaactcccatttgccttcaagatgaactcatagattttttgagagcatgataggccttttatcatcagtaccttgttgtatcactagttttatgactgtccgttcatgttcccatcttccaagcatggtccttcttgtctacctttcaaaaccacccttggtactccagattctgggcagaaaacgctacatgccttcagttacttgaattggcaatgctctatttccctcttctgagacttagaactcattgaattcacattgctttctttattctttctccactcacccccattctttcacagggcaaactttgtgttatttcctccattaaagtgccccaattctaccccacaacagagctatttccttttctgtgtgtgcctcctgtgtgaagcctagacaaccccaaattgtggcatataatcacagtgtattggaatttccagtttccttatcggatgcttcaattcattgtgtattgttcaaagtcagagccagactcatttaattattatatgtttaagcctagaggaatatacatacatacgtataaattaggtcctgaaaataatttggtgtatatttaacataaagaagtacagttttccttgagtcttgaaaaaaatgtttccagtaatgaaactcaggagagcagataaatcagaagtttaaacctgtgcaattatatggataccaaaaaagtattataaattcagaaaccacaatatatagcatactgttcttttatgtgcttattttgcaaaatcaatccctattattgaaatttggtaatatatgtattaaaattatataactctgtgtggaaggagaatatggcatattggaaaattaaagtctgcgctgaaaatgtggtgtcttggattggtattcttggcatacaactggctgcctagggcactttaagctacttaatttatctgattactgttttcctcaattgaccttcaagtgaaaatggcttaagttccttcctcctttagaatcccaaaatcctaatattactggatgttagggattttattgtatcacttccaaaatgtatatgttgaagtcctaacctccagtacctcagaatgtgactatatttgaaggtagggccattaaagaggtgattaaggccaggctctgtggctcatacctgtaaaaccagcacttcaggaggctgaggcgggtggatcacttgagtccaggagttccagatcagcctggccaagatggtgaaactctgtctctacttaaaacaccaaaatttgccaggtgtggtggcaggtgcctgtaatcccagctatttgggaggctgaggcagaagaattgcttgaatccatgaggtggaagttgcagtgagctgggatggcaccactgcattccagcctgggcaatgagtgagactccatctttaaaaaaaaaaaaaaaaaagaggtgattaagttaaaatgagaccattaagatgcatcctaatccaattttactggtatccttctgagaaaagaacatttggacacacaggacaccagtgatatatgcacacacacaaaaataccatgtaaggacacagcagtaatgcaatcatctggaaaccaaggggagagtcctcagaacaaatcaaactcgctgacactttgatcttgcatgtctagcctgtagaactgggaagattattctggttggctcaatctaattcaaggcataccttggaagtattggatacctcggaagtattgggggttgggttccagaccactgtaataaaatgaacaaagtaagtaacacatacattttggttttccagtgcataaaatgtacgtttacactatactgaagcctattaagcgtgcaatagtattatgtttcaaaaatgtgcatacctgaacttaaaaatattttatttctaaaatatgctaacaatcgtctgacacagagacacaaagtgagcccatgctgttggagaaatagcactgatagacttgttccatgcagagttgccacaaactttcaatcttaaaaaaaatacagtatctgtgaagttcaataaagcaaagagcaataaaaccagatacacctgtacatgagaccctaaagcagagaatctgtcctggtcaggtcagagagatgatacaagaaggaggaagagaagaaaggagactgagaagggaaggagaaggagaaagagaagaagagatttgaaggatgagagggtcttaacgaattgttactggctttgaagatgaaggaaagtagccatgaatcaagggacacaaggagcctctagaagccagaaacagtcctcagctgagagtcagcaaggacaaactgatctcagacctgcgaccgcaagaaactcaattttgtcaacaacccacataaagagaaatgaattttcccctagagaccccagaaagggatgcggccttacctacaccttgattttagtctgatgagacctatgtcaaacttctgacctacagaactgtaaggaaataaacttgcattgacttaagttgctgaatttgtggtaaatttgttacagcagcaatagaaaaccaatcaaatgttctacttaatccaaaatcttcagaacagggatgcggtgtgtagtgtatttattgcatgggcatgtcctgaaagctatgagcttcctttagtttttccggtttcaaatacaaacctcaatcggcatcttttacaaactactccatgtgcttgtcatatagcctccacgagtaggctataattcaccattatcttgttgacaaggctatgattcgtttcacacatcattgttcattaaaataatgtagacctgcaccttagttccatcccacttcaaagcccgactgctaactaatttatggtcaattaattttagtggatgaagagccactaaatttagtggttttccaccgttgtaattattttattttatgaaatttactgccttaaacaaattacaatataatgtttttaagactgtcttttctaaaattttcttataacagtatttagccatatgtgaagaaagaaaggcatttaattatgtttaaagattaaaattacgtttctttaaaagttacttattttaaaaccatgattactttcttttctctgtagtattcaattttaaatacaaagtacccatgttatatgttgaattgaattctttctgctttccattcttttccaagtatatttcaatattgaagaggaaaaactttctggaagttatgtaaaaaatattgttttttattgaaaaaatctctgtgatgcttatttactattatccagaaatattgaccataattttatttgataaaagattatatattgatccacgttagcaggtggtcactgtgaacccacatatttccatgctgtaaaattttgcagttgaaatgcaatttttacaacactgtttaacagtgttctccaaaggaattttaactatctagacagctggagggtgacaaatgtagttaaaaatagaccagaaagatttcttggttgcagaggggtcaattacattgtctaaatcggagaattcaaaaagaagaaattattctaaatgtacgtttcacaaccatacaggaactgcttgaaagtgggaacaaatcaaataaatgagatctaggtacaaaggactttacattccatgcgtttatgaaggagtataaaagcaatgtattacatttcaaggaaatgcctttgggggaaagaaaaaaaagaatgggcaaaaaaagactagaaagaaagtattcactatagtttcaataaaaggtatgatatcctaagatatcagcatatcaaaaaagtaggaagaattttcatttaaaagtaaaatcaccaagttttaaaaccttacttgaaatgaacagcagaaatttgcagctaaaaggaaaagtgcctcagaataaaccattacatctagcaggtgctcatctgtcctcagaaagtttctacttataaagtacactaaacttttagaataaagaaaaaacggctttttatttggaatttcttcatgcttatgaatcccttaaaaaatacaatatgtccaataaaaactcaaccttttttttttcgtagacagtagtgcctatttcttcggtttttttttttttcttgttgttttttgtgggggatagaaacacaatgttgatccacagagatctcaatagctttttagatgtaaaatatttctccaaaatacataagtgtgaaaaatatgatgtttatggacatgtacatatcaaatcatattatatcaacaatacaacagtgtctgatgtgtgtgtgtgtgtgtgtgtgtacttgtgctagacagaacaaattactatttactatttactactatcacaagacagtaattactgttaaatactcagttactctgatctgaggcaatggcataaagacttttgaacaagagcctgttttaactctgtggaacatgcagaattttttttctccttacatttattctacaaatcatcagataaacttcaaaaaagttgactaaaatattaactcattccataaaagaatgtatttttctactttactttttcactaaaattgcatcttttaatgacagaaatattgtacatttctttagactctaaagccccactgcctgaagtagcataccagttccactggtatggttattttattaattataatatatattttattaggttattttattataattaatgtttaaaagtactgttatttcatgttataattgccacataacaaaactattaattctcaaatgttataagtttcttggccgggctcggtggctcacacctgtaatcccagcactttcgaaggccgaggcgggcagatcacgaggtcagaagatcgagaccatcctggctaacacggtgaaaccccgtctctactaaaaatacaaaaaattagccgggtgtggtggcgggtgcctgtagtcccagccactcgggaggctgaggcaggagaatggcgtgaacccgggaggcggagcttgcagtgagccgagatcgcgccactgcactccagcgtgggcgacagagcgagactccgccttaaaaaaaaaaaaagaaaaaaaaaagttatatgtttctcattacaatgagatgtagaacaaaacttcaaatagctgactgttttgtcgcactccagttgaactttcaacaccttaataaaatatctgaaatgtctgaaaataggtcagtgacagaaatattaaagcgccaagtgtggagttatgagggtcagtcaattctgagtgttgtctatggtgaagcaggggaacttcatcctagaagcaccaaagcagatttttaaaaaataggcagaattttaaggttagttttgaaagatataaacagtattttcaaaattagttatcttaaaaactaaactcttattttgcatttaatgaacaatgataaagaaaggaaatttatgtaaaaataattaatgtgcctaacagaatgctcacagattgtagggatatcaaaattaaacataataaatatagttaacttttactgagctcttactctatttcagatctttttaaagctgtctcacagatattaacatacttaaacttcatacaaaaatgctaaaagatacatactaacaataaccccgattttcagaagacaaaataaggtacacattgttcaaacaaattgcctataattagaagattggtaaattagacatgcagttttcaaacccggagccttcactcttaattaagaaacaatataagaagtattaattgcatattgtactatcaatgatgataagaggttattgacattagaattagtgaataccttttctctttaccctttcctaggcatttctcatttactgtgataaagaggacagttactcttgcctagattttccttgcccttcttttctataggaatacaatacccctgaagatgcctatcctctctgaaaatgtatagtgttaaagtaaaaatatttgctattagctttctgatagacatgtggaaaatatcttcagagatctctaagtataatgaaaaaacaatttattagtatatttgtacttcatggaaaaacattaacaaagattacttatttatgcattgatgacttactgaactgagaatctaccatatccaaggaaataatttgttcaacattaaagtgctgattcacactgtattcaaaatttctctgataaagtaaatctaaacagagagtgaaactgtccttcctaatggccatgaacatcttgcaatggagcttagtacaaaagggcaacaccctgcaagtacccccatttaataagacatcttattaataagtatggaatattcatgtgcctgcaatatattttaaaataagctagagttaacagtaaattatttaaaattgccactttgggatgtccattctattgaaatttataggccctcttcaccattttattgcaccctataccattaccctttttgaatatgaatctattcacatttgagaagagtgagcttagaataaaagattgaagacatgtctttcagatttggagaacagaacagcaacaacaacaaatggaagagataagtaatgacttaccagcaaaatcagcactcaaggttattgaactttgctttagtttgaatgtcccctccaaaactcatatcaaaatttaacagccattgtgacaatatttagatgtgggacctttaagaggtgattagatcatgagaggtcagccctcacgaatggatgaatgacattatcacagattagtcattatggaagtgagtttctgataaaaagcatgagttcagcccttctctgtcttgttctctgtctcacacacttgctttctcaccatgtaacactttccaaaatattatgatgtagcagcaaggccctcatcagatgtggctccttcatcttgaactttccagccttgagaactacatgccaagtaaatctcttttctttataaattacccagtctgtggtattctgttactgcagtagaaaataaacggagacaagcatctacacaggtggctccaaataaggaatattgagttttatatactattttacataacctttgaggtataatctacttacagtaatgttaagccatttaaaatgcacaggtggtgagttcaaaagatgtacacatttatgcaatcacggttacgtttacaacataaaatatttcagtcattcttatcttttctctgcattcttctgtttgaatttttccactctgcaaaatgattttgacattcatctgttatattgcttgtctcattagtatatttctttttattgttgagtcctttctatcaaatggatatgccataatttgcttatctacgtatcatttgatgaacatgtgagctatacagatatatatttcaaatctccagcttagtttgccaaattacccacaccacatatatatatatatatatatatatatatatatcatatatagatatggtatatataagaatatctctatctatctatccatctatctatctatctatctatcacctgtctattcttaaagctaaaatataaagtagtgcagatagtataatgaggaagtcatgtgttgcttaacaatgggtacatgttctgagaaatgcactattaggcaattttatcattgtgcaaacatcataaagtatacttacacaaacgtggattgaacagcccagtaaacagccaggctgtatggtatagcctactgctcttatgctacaaacttgtacagcatgttatgatactaagtactgtaggcaactgtaatacaatggtatttgtttatgtaaacatacctaaacatggaaaaggtaatgtgttgtgctacaacattataacaactacgacatcactggttgataagtgcatgactgtattccaggtccccacatacacataatcacatctcactatcaacttcctgcgccacagtgatacattccttacaatcaatgaacataacacataatattgccctgaatccatagtttacattagtgttcactcttggtggtgtacattctgtaggtttcaacaatgtgtaatgacatatatccaccattatagtatcatgcagaatagttttactgccctaaaaatcctctgtgttttgcccattcatactcacccatctcaagccctgacagtcactaatcttttcactgtctccacaggtttaacttttccaaaacggaaaatggttgaaattatacagtatggagcctttatagattggctttgttatcttagtattaacatttaatttttctccatgtctttttatggcttcatagatcattttggcatcgaatagtatttcattgtctggatattccacaattatttatgcattcacttattgaaggacatttttcttgcttcaaagttttggcaattattaatgtaaagaaagctgctataaacatccatgtgtaggtttggtgtagatgtacatttttaattcatgttggtaaattccaaggcatgtgattgctgaatcttatggtaagagtatttttgctaggtaaataacttttttttcaaaagtaactgtaaaattttatattcccaccaccaatgaatgggagttcctgttcttcctcaacattgctaccatttagtgttgtccatgttgtggattttggccattctaacaggtgtgtggtggtttaacacagtagttttaatttgcaattctctaaggatatatgatgttgaacatttccataggcctatttgccatctgtatatcttctttgttgatgtgtttgttcagatgttttgctcattttttaaattgggtatttacctattgttgagttttaaaagttgtgtgtacttttttgataacagttctttgtcacatgtgtcttttacaaatattttttcctagtctgtggtttgtcttctcattctattgaattagcacaaaagattttagttttaatgaagtccaggttttcagttatttcttttataaattgtacattttgcattatatctaaaaagtcaccactatactcaagttcatgtagggtttcttcctgtaatataggagttttataattttgcattttgtgttaatttttgtgaagagtgtgattactgtgtctagatttatttattttttgcatgtggatgtccatttgttccaacaccattagttgaaaagtttatatatgttccattttactgcctttgattcttcatcaaaggtgagctgactagatttatatgggcttatttctgcactatatattctgttccattgatctatttgcctattcttttaccaatatcacactctcttgtttactgtagctttatagtatgttatgacgcaggatagtgacttgggtctttttaaatactaagtgggctattctggcccttttttttctctgtatataaattttagaattagtttgctcatacctacaaaataacttgcttagattttgactgggattgcatggaacctatagatcagattgggaagaactaacatcttgacaatagtgagtcttcctacccatgaacatggaatatatctccatctgtttattctaaagaataatgccttaacatcagagttttgtggttttttcttatctaaatcttgtgcatattttggtatatttataactagatatttaattttgggagatttgagtagaaatggtgtttttttttcaatttcatatcctatttgttcactgctggtatatgagacaaaaaatgatttttgtatattaacatcgtatcttgccacctttctataatcagttattaattgcaggagcttttttattgattatttcaaattttctacataaatgtttatgttatctgaaaacaaattttgttctattttttcttccctgtataagcttattcttttcataattattgcattatctagaacttccagtataatgttgaaaagcagtggtgagagaaatcatctttgtcttgctcctgaccttcacaggaaagcttctagttccttgccaataaaaatgacattaatggtaagatttttgtagatgttctttatcaaactgagaaaatttttctctatttttagtttgctgagaattttaatcagttgtattttgttaaaaacatttttggcatccattgaaataatctataatttgtattgtttatcctgatgatgtgatagattatattaattgatttccgaatgttgaataaatcttgtatacttgaaataaatcccacttgttgatagtgcataattctttttacacattattggattcaatttgctaatgatttgttgagaatttttgtatctatgttcatgagagataaccatctgtagtttaggtgtaatctttgtctagttttagtatcagggtaattctgattaccccaaaattaatttagggagtattccctctgctcatatattctgaaagtaactgtagggaactgatataatttcctccttacatgtttggtagaatttaccagtaaactcgtctggacctgatgctgtctgttttggaaggatattaatttttgattcaatttctttaataagtatagataggcctattcagattgtttatttcttcttgtgggacttttggcagactgtgtctttcacataattcatccactttatctaggttatctaatatgtggccatagaactgtttgtaatattcatttattttccttttaatgtccatagggtctgtagtgatataccctttttcatttcttggtattagtaacttttattctttttttctccttccttatttattccaactagtgacatcattttaaaatatcaacttttggccttgcgagtgtattccctattgatgtcctaattccaattttctctatttctactctaattttcattatttcttttctactgctaaggattttatttgctcttctttttctagttttctaaggtacagtttatattattagttttatatattctttgtttcttatatatgctttcgatgctaaaaatattgctgtaggccaagtgcgatggctcatgcctctaatcccagcacattgggaggctgaggcaagcagatcacttgagcccaggagtttgagaccagcctgggcaatatagtgagacctcatctccagaaaaaaaaaaaaattagctgaatgtggcagcacgtgcgtgtagtcctagctacttgggaggctgaagtgggaggctcgtgtaagcctggggagtcaaggctgcagtgagccgtgataacaccattgcactccagtctaagaagcagagcaaggccctgcctcaaaaataaataaataaataaataaataaataaataaataaacaaatacaatttctaagcactgtttttgctgtattctacacattactgatagttgtattttgaaaagttgtattttcattttcattcagttcaattaaaacctttattgagacttcttctatgacccatgtgttatttagtagtgtgttatctctaaatttggggggattttcaatttatctttcagctatttatttttagtttaatccattgtggtgtgaaaacaaacatcatatattttctattcttttaaatttgttaatatgtgttttacttctcaaaaggtggtttgctttagtgaatgtgccatatgagcttgagaataaagtgtaatctactgctttttttttttaggcaaggtctcatgatcatggttcactgcagccttgacttccctggtttaagtgatcctcccttctcagcatcccaagtggatgggactaaaggtgcacgtgaccacacctggctattttttttttttttttgtaaagatgaagtctctctgtgttgcccaggctagtctcaaatttctgggctcaagtgatcctcctgccttggcctcctaaagtgctaggattacaggtgtgagccaccgtgcctggcctaatgattttttaattgtctgtagatttcaattatattcagtttattgatcattttcattatttcaattatgtatttactgattttctctcatctgagtctctctacttctgatagagggatgttaaaatttctgactataatagtggattcatctatttgtccttgtagttttatcaggttttgcctcgtaatttgatgctctgttgttaagcagatacatagtaaggactgttaagtcttcttggaatattgaccacgttgttgtgatttaatgcccctctttatccttgataaattttcttgctgcaaagtgtgctctgtatgaaattaatatacttgtttttactttattttcattagtgttagcatggtatattattttctgtccctttactttgaatctatacttgtctttatatttaaggagagtttcttctagaccccttcatttcaccatatacaaaaatcaactcaagatggattaaagacttaaatgtaagacttaaaactataaaaatctagaaaaaaacctaggaaataccattttagatataggcctttgcaaataattcatgatgaagtttccaaaagcaattgcaacaacaacagcaacaaaacaggcaagtggaaactaaagctgaagagcgaaagaaactatcaacagattaaacagataacctacagaatgggagaaaacattctcaaactatgcatctgacaaaggtgtaatatctaggatctataaggaacttaagtctatgagtaaaaacaaccacatgagtaaatgggccaaggaaatggacatctctcaaaagaagacacacagttaacaagaatatgaaaaaatatttaacatcattaatcattagagaaatgcaaatcaaactacaatgagatatcatctcataccaatcagaatggctattaattaccagtcaaaaaataacagattttggcgacattttggagaaaagggaacacgtatacactgctggtgggaatgtaaactagtttagcgactatggaaagcagtctggaggtttctcaaagaactaccattcaacccagaaatccaattactgggtatatacccaaaggaatataaatcattctaccaaaaatacacaggcacgtgtatgttcattgcagcactattcctaatagcaaacacgtagaaccaacctagatatccatcacagtagactggacaaagataatgtagtacatatacatcatggaatactatgaagccatacaaaagaaaaaaataattttctttgcagcactatggatgcagctggaggccattatcctaaatgaattaatgcagaaacagaaaaccaaatgccacatattctcacttgtaagtgggagctaaacattgagtaaacatggacacaaatcgcaacctaatagataccagggcctacttgaaggtgaagaagggagaagggcgagggtcaaaagactatgctcactacctgggcgacaaaatgattcgtacaccaaaccctgacactcaatttacccatataacaaacctgcacatgtaacccctgaatctaaaataaaagttgcaaaagaaaaatataaataaataaagtgggtttcttgtaggtggtacatagttgggtatcttcttttattcactgtgacagtattgatctttagttggtgtatttagaccattgacatttaaagtgatgattgttattattacattgatatctaccatatttgctacagatttctatttgttgcccatgctctttgtttctgttttcgtcttctacattatttatgtcttttgggttttaattcagcattatttaagattctattttttctcatttctttaacacatcaattatacacaaactcacgtacatacacaaatatatatataccttacttagtgattgccctaaaatttacactgcatatatttacaactaattcatattaacttctaagtaacagtatactgctttgcagataatgcaagcacctcatggtaacaatatatttctaattccttcaccttttgtatcatcattggtcatttaatttatacataggtatacatgatcatatataaatatagatatgcattcgagtacacataattgaaaacatttttctactattttgaacaaattgttattggttggatcaattaaatatgaaaaaagttttatcttaccttcacttattcattatttgaccctcttcctttctgtatgtagataaaagtgtctaatctgtatcgttatcttctccctctgaagaacctttttttcaactttattgagatataattgacaaaataaaaattgtatacatttaaggtatacaacctgatgttttgacatacagatacactgtgaaatgatcaccacaatcaagctaattaacataaccattatctcacatttgtcatttgtatgtgtgtatatgtgtgtggtataagatccactctattaaaaattttctaatatgcaatagagtgcattcactgtggtcagcatattgtatattaggtcaacagaattcgctcatcttacaactgaaagtttctaccctttgacaaacacctacccatttcttcactgctacccctgcagtccttggtaaccactattctattctctgctttgatgagtttgactattttagagtccacatgtaattgatatcatgcaatatttgtctttctgtgtatggcttattttatttagcataatgtcttcctccacgttattctatgttgtcatacatgtcaggatttccttctttattaagggtgaatttccctgcccacacttttcgtcttttttataattgtcattgtaagagttgtaagctgataaccccttatggttttgatttccatttatctgatgatgagtgatgctaagcaccttttcatatatctgttggccatttgtatgtcatcttttgagaaattcaagagtgccaagaatatacaaatagaaaaacaatagtcttttcaataaacagtgttgaaaaaactgaatatccatgagcagaaaaataattatcagacctttatttcacaacatatacaaaagtcaattcaaaatgttttcacagactatgtgtatgataaggagttaatatccaaagtgtataaaaaacccatgtaacacaatagcaaataaataaataaataactcaaacaaaaagggggcaagaaaccttaagaacctcctttactatatcttgcaaggcagagcttacttgcaacaaatttccttaatttttgcttgtctgagaatatctttatttttccttcacttttgaaagatgcttttacaggatacaagattggtgataattttttctctgaatgctttaaagatttcatgccattctctgcttctgtggtttctgaggagaaaatgaatgtaatttttatttttcctccactatagatgaagtgctgtttccctttgtctgctttcaaaattttcttcatcttctaaagtttgaatacgatatgcctaagtgtcgatttcttagaacttattctgcttggtgttctcagaatttcctggaactgtgctttggtggctgatgctaatttgaaaacattcacagtcattactgcttcaaatattggcttagtttctttctctcttatcttcctctggtattctcagtatgtatatattacataatctgtaacagttgctccatagttcatggatattctgctctgctttttatttttttctttttattcagtctgtttttccttcttgcttttcagttttggaagtttctattgtcatgttctcaagatctgagattctttcttcagctgtgtccagtttattaatggacacaactgaagaaagcattgttcatttctattatggtgtttattttctctaatatttcttcttcatccattcttaaaattttatctttctgcttaaattacctatctgtccttgaatgttgtctactttttccattggcaccctcatcattattttaaattcctagtgtgataattccaacatccctgccatatatgactccaattcttatactttttcagtctctttaaactggtttttaaatggttggtttttgccttttagtatgccttgtaattcgttgctgaaatctggacatgatatactgggtgaatgaaactccagcaaataggcctttagtggtgtgatggtaaggttaggagttagagagggcaagagttatatagttctatggttaggtctcagtattggtgagcctgtgttcctagactacaaactatattagtgactctcagtgttattccccctctcccttaggtgggactggatggctagagaagactacgattgggtatttcccttcatagaaagaaagagctaaaactaactggagtttggtattccccttttccaggtagggtaaactctgataaaatcccatcaggttaggctatagtaaaatagattctactgaggacagccattgttaaaaagaacagaatgctctgccatatgttaaaattatttcttttcctgttcccctactaaaagcatgaagatattattttttcctaatatttattgtgaggagctggaatagctactaaaagtaaaactcacaaaaggatggggcctcccatgaccctgtcctgtgctttttactgtcagacttttccaaccttagcctccagcaatccattcattacagtttaggttttcttacctggactcctgcagagatttctgcagttttgaggatagtagtttgtcttgtgatgtcaatttctctgacagtctaagaagaaatttttatttttgagttttgttcatctttttacttgttgttaagacagagtggttgacttctaaggcgcttatatgacagattgtttggcatgctttttaaggtaatagggagttgatcattagcatatgaaataaatagaatcaattttaaacagatattaataattttatctgaatatttgccccaaaatttatattatcagataaaacatatcacatataatcaataagaacgttattataaaaacttttaaaaataaaaagttatctaatttatgcatttttcatttacatattttatatatatatacacatccatatatacacatgttatatataataaatataatatataagtatataaacagtatatattgtgtatatatactataaatgctacaaaaaatatatatataattagtttttggtattgtatatgacattaaatctcatattaaaataaatagaaaacaatatttctatttttatttaaaaatcttatttgcagtttgccaaattgcaatttaacattataaaatattaatgatggctaaaagttggaggagtaattataccaaatattttgttttttaatatatatataaatacacacacacacacacacatgcatatactgagggttcaaatattattcagagttagcttcaacaatgcagattttcctctgagagtttcatatcttaatctgcaaaaaagaaaagaaagtgtggttacattatcataaaggatatagcttctagcttcagagtgctataccttgataggtatatgaataaaaccttgggcatatttcttaattatcaaaaattcaatctcttcgattgtaaaatgagaataagtacctacatcctacatttctagatgatgggggcgtgtacaaatgtgcataaagcacttaacaacagtgcctagcgcacgacaagcaggcattaaatgacagctattactagatattaactggacatgtgttctcataaattcatatggcctgcttcctatgttgacactggtagggataagggaaaggaaaagcaaagtatacgggtaattaaactgcccctaaaaaccaagaaattctatgaagcaaaaaataataggtaaacatctccaagtatcaattttttatgtattatttttccttgcttttttttccacagggttctttaagtttttcagtatttgagaaaaaaatgtataaaagatgtctttctgaagcaaaaaaagtagtctattaaaaaaaaggccccatccactttattttttttctccagaaatgctgggattgctggcattctttttagtcttcctttttcttctatttgttgatgtaaacacgctctccatatttccatgagccatgtctcacatattataaaagggcatgctaaatataattaaaagtagaggcagaagcattaccagcaaaagagtgggtagcactaaagcacaatattaatatccacagtgaaatgtcattgagtcatcaaggtttgtgccatatgggtctgtggcttaactcatccccaaagactgaattgatttgcaattacagcatattttggggttaaagaaaaaaatgtaaaaatggtagttaatcatcaattaggatcgcattttaccgtgctgaaagttatttaataaaagatgataagagcaggaacccgcatccaggaacagagccctttgctcctccctcagaatggagaccagaaatcagatatttatgcccaagaaaagcaggatttcattcggcacttctcccagatctttagagtgctgactgaggatgagatggggcacccacagacaggagatgctattgcccagctcaaggaggtcctggagtacaacgccagtggaggcaagtatcagcaggctttgagagtgctagtagcattcaggaagctgatagagccaagggaacaggatgctgatggtctctagcgggccctgctgtgggatggtgtgtggaactgctgcaaactttcttcctggtggcaggtgacatcacagattcatctctcacccaatggggacagatctgctggtatcagaagccaggcgtaggtttggatgccatcagtgatgctatccttctggaagcatatatctaccgcctgctgaagcgctattgccgggagcagccctgttacctgaacctgatgaagctcttcctgcagagttcctatcagactgagactgggcggacctcatttcctgcatcaggacttactttggtcctggatgaataatattgaagatatatgcttaaaatacttctaacatcagaatttgtgcacgtgttttcttccccaagaaagctataaatagcaaaaattttgctgtaagcttccctatgttctctctccttctcccctcccctaaaactcaaaggaatgttaaaagcacgtttctctgtgagcgttggaccttatctatgctcccagttccaattccttgtaatcatactttgtaaagtcctgtaaaatcctgtctcctttgccatgacactgcaaggtcataaagtagatgaaacctaagttacaattctggttttccttaaaatctaagatatgtcacaaaataatttactgcctttgtttctcgctctggtaacatcttccctctgcacctatttcccgcctatttaaaaggtgatcgaaaaatctaacactgtctacccacttgggaccccttccatgctatggaagctttgtactgtcactctgctcaaaaaagcctacagttttgttttgtttttttttctctcagtcgtgtccctctcacttgccgcaggctgccgccacaccagtactttggcgttgctaaggcaagaacctttggcgttacataatgagtatgggtttagacaaagccataggtagcaaatgataatgaagagagaaatgtgagtttagcagaaaatgacatgattaaaaagtccatatttggtttaacaagattggtcccttctgtgaccatgaatattttcacaccattgtaatttctgcttaatgccagagaaatgctacagaaacttaaaaaaaaaggcagtggagattaaggaaaggattgagggcaggggtgagagaatgtcttcttggagaagtttgtattttaggcatacatttagaaatacgtaggttaaaaggtaggttggtggggctttgacaagagcttcccagaatgaaatacatggaaggaagtttctagttgtatgttcaggaaagtagacttaatttgatgcaaataaaatgtgggacatagggaagaaagtaatttccttataaatattttaaatagttttgcatatatagaaatgacacggctcatcaaagcatttaaaaatacttattagatactttgaagggcaatttcttcacgtgtttggcaaggcaagatattttccattgtcattaactttcatgtgatagaaaaactaatctggccccaatttagaggtttttttttgtttgttagcaattataaagtcattaagaaagtgttcagaatgtattgaataagtgaattttaagaaagtatttgaaaccaaaaagagtaggcctgcaggggaaaaaaaaaaaggagattgctacttgccacagataaaatggagaatacatcaataagtatgttgtagaatgccataaaaattatgacatcttcagggcaaggcaatagaagaacataacattttttttataaagaacatcaagaaggaattttacccttaaattaatagacaagtgattacctggtgaaaatgatatttaaagtgaagagaaagtgactttttcagaaatgtcaaaagctctggaaaaattaataaattgactcttatttgagaagtcagcgaatctctcaacaagaggtttaaaatcaagagaccattcagaatgaagctgtgacttaaatggcaaatgtctaagagagaaagaagcgggaagtgattacagtaattgacacagcattgtccttaaaggctatcttggcagttctgggaatgactcaacatataaagggtaagttataaaatattacgcagctcttgtgttgagaatggtattccagcattaggaaaaaaaatatctggcaaaaaatgataggtgataaaaattctcacattcacagggaaattaacctgtttggcatttttcctatatggtgagttagcagcattgaagttaaaataaattagatatgtaagcccaggagaagttttagatgaaatgttaattgaagttaatcatggcattcacatatatgatgtatactctttaggtttaatgacttttttttccaggcaattctcctgcctaagcatcccaagaagctgggattacaggtgcctgccacagtgtgttcctaatttcttttttttttttttatacttctgggatacatttatctgggatacatgtatctgggatacattctgggatacagaacgtgcaggcttgttacataggtatacacgtgccgtggtggtttgctgcacctgtcaacccatcatcttcattaggtatttctcctaatgcaatctctcccctagccccccaccccccaacaggccccagtcagtgatgttcccctccctgtgtccatgtgttctcattgttcaactcctaagtatgagtgagaacatgcagagtttgcttttctgttcctgtgttagtttgctgagaatgatggtttccagcttcatccatgtccctgcaaaggacatgaactcatccttttttatgggtgcttagtattccatggtgtatatgtgccacattttctttatctagtctaacattgatgggcatttgggttggttccaagtttttgctattgtgaatagtgctgcaataaacattcgtgtctttacagcatgtgtctttatagtagaatgatatctaatcttttggttatatacccagtaatgggattgctgggtcaaatggtatttctggttgtagatccttgaggaatcgccacactcttccacaatggttgatctaatttacactcccaccaacagtgtaaaagcattcctatttctccacatcctctccagcatctgttgtttcctgattttttgatgattgccattctaacaagtgtgagatggtatctcattgtggatttgattggcatttctctaatgaccagtgatgatgagctttttttcatatgtttgttggccacataaatgtcttcttttgagaagtgtctgttcatatcctttgcccactttttgatggcgttgtttttcttcttgtaaatttgtttaagttccttgtagattctggatattagccctttgtcagatggatagattgcaaaaattttctcctattctgtaggttgcctgttcactctgatgatagtttcttttgctatgcagaagctctttagtttaatcagatcccatttgtcaatttttgcttttgttgcaattgctattggtgttttagtcatgaagactttgctcatgcctatgtcctgaatggtattgcctagattttcttctagggtttttatggttttaggtcttacatttaactctttagtccatcttgagttaatttttgtttaaggggtaaggaaggggtccagtttcagttttttgtgtatggctagccagttttcccagcaccatttgttaaatagggaatgctttccccattgcttgtttttgtcaggtttttcaaagatcagatatttgtagatgttgtgtgttatttctgaggtctctgttctgttccattggtctatatatgttttggtaccagtaccatgctgttgtggttactgtagccttgtagtatagtttgaagtcaggtagcgtgatgcctccagctttgttctttttgcttaggattgtcttgactatacgggctcttttttggttccatatgaaatttaaagtaatcacttcctctttaacaccccaactacagaatacttaaacatgtttaacagcatttagcacattctgctttctattaaagcaatctaggtggtaaagtctagtcaataaaaggccacagggacgaacctgtaatctcacaaaccaggagtatctttgtaggatttggctttccatgggatgattttgagaaaggtttaagaaaatatcagttttggatgattcactttttctcagacaggattagaattggggattaatttggcattgggtgcctgcataaagtgaggatggtgtagtaattgggtatctccagttataaacacaagaagcatgatagagctgggaatgtgattgcaggaaagcaatagtcactccaaaaggagatcctcatgatatgaatacggaagaaacaatatttcctgctaatgtagtagccactgtgttcttttattattattattctatatttatttttaaattttcattgttagtgtttttttaataattagagtcttatttctctctcttttttttttttttactttaagttccgggatacatgtacagaatgtgtaggttttttacataggtatacacgtaccatggtggtttgctgcatctataaacccattatctaggttttaagccctgcatgcgttaggtattggtactaatgctctccctcccctggcccctcaccccccgacaggcccgcagtgtgtgttgtttccctccctgtgtccatgcgttttcattgttcaactccaatcatgagtgcaaacatgtagtgtttggttgtctgtccctgtgttagtttggtgagaatcgtggcttctagcttcatccatatccctgcaaaggacataaactcattcttttttatgtttgtatagtattccatggtgtatatatgccacatttttttaatccagtctatcattgatgggcatttggtttggtttgaagtctttgctattgtaaatagtgctgcaataaacatatgtgtgcatgtgtctttatagtagaatgatttataatcctttggttatatacctggtgatgggattgctgaatcaaatggtatttctggttctagatccttgaggaatcgctacactgtcttccgcaatggttgaactaatttacactcccaccaacagcgtaaaagcattcctatttctccacagcctcatcagaatctattgtttcctgactttataataatcaccattctgagtggcatgagatggcttcttattgtagctgttgttttctatgcctgtccaccccatctcccctctagcctgattaatgagagagctttttgtctttttcagtccaagcttatttttattttcattttcaaacactgtttagcaatgttccatgtgcgtactattggccctattacttgtgtataggaatactgtttgttcaactttttcaggggaaatgatataaccaattggtcaaaaggcagttctataattacatgggttccagtccaggttcctctaatttgcaattttttgaataatttacttccctgcgctatccactcagaaagaaaatgagaataataatacaatagctcataatcttgtattgaataatggaagtaataatttataaattgtgttgcatagcgattagcccttacaagccttcaaaaaacatcacatgatatttcattattcctatatagttcctactacaaagacctatacataacacttataatcacaggaaaataaaagagaaaaatataccctgttatcaaaactctaagactattactattttattgtgatatacttactttcaggtatataatcagggatcatttcccatttattgcttataaaatccagttacaaacatatattttaaaaatatttttaaatgttttactatttgtcataatttctttaggggtgattttctgaaggagaatggttatttgaaataatgtgtctatatgattaaattacataaaaatgtattattggaaattaagtgtttcttgtttgtttttgatgaacacagtcgaaatttgtgagggaaagtaaaaacactaagaaaaaaatgtaatagaaattgatccttttcttcaacgtgattacctaaataatttatcctttaggatacccccagtatatataaatgtacttcttgcacttgaactgtgccagaaatacttattgctatataggaagtgctcaagatccttgaattaagcaattgaaaaaatttgtaccaccctgtttgttcaaaagcagtgaaatttaacagactcacgagaccaagggctgtggcacagagagacatttaagtcatagatgatcttcaagaagttcagaatcttgtaaataaactaaaatttatcatgtagttttatcatccaggaatatttccaaaccgttcaaatggctgaaattgtatcttcaaagaaaggcagagagtgagaaggttggcgggggtgggggcggcgagagagagagataaagagagagagagagacagagagaaataaggaggaagaaagaagggaaaagtgcatgatcaccctggcagaaacttagtaggggtgtactcatttgtgaaaattgacattttcaaacatgtcctacttgtgaatcatacattttacctgattcattaactccatgttacagcagcagatatcctgagagatggagatttagccctctcttacattcttgcatcacaaggaactattaggttggtacaaaagtaactgtggtttttgccattataatataaagaaaaagctggaacatccttgccacctatcactattgttcggatatttcaaaggggcagttttttattcttgaaggtaaaagttatttatcaagtaatttgataaattatctagaagagatatggaaaacaaaaataaatagaatcaaatatacttggaaaacacacaacactgtcttgtttttacatacattaaatacattatttttatacacattaaaataattttgttttttaagtgaaggaatacttcagttcaagagttctgaagcaaggctgcctgggtttgaatgcctacaaccatgtctactatgttttatcaaattgaatacattagtttttaatgggcatcattactctacatactattgcccacccacctgcaaatgacttgtaggattacaattatttcaagatgtatattgagttcagagatgtagtgatttggaaaaaaaatgtgcatattacagttaatgaaatatggcagtagcagaatgggcaaatcacgtcatctacataaatctgagcttttttattttcaaaaaagggtgacaataaaagtacccacctatttaaactgttttgatgattaaataataaagttcacgtaaagcacttagaaaattgcaaggcacacattaaatttattagctggaataaaagcctaaaccattatgactttttttttttttaaaaaaagcaatattttaactaaaaaaaaagaaacaaagaagcatatctttttcatataatggttttcctgggaggcagtagcaaacatctgggataatatgcgttctgcacagtggtgactggagtccagttccatcaagtgaggaaccagaaagacagtatatggaagaggtcacagtcttacagagtcagacctcaaagtagctcattgccattcactttcccaagggataatttaattttatttgtctatgtctacttctaaggtgggctgagaaatgaattctctagccagaaagccacatgcctaggagcaaccctattcctaggtaaaaacaggagaatggatttagtggagagctaaaaaattctgccacagtacaagtatatagtcaataaatatcagctattgttattacttctagctacaatcaaaaagattgatgaaatgagaaaatgctgcattcatttaataaaattataacgtatgaaaggattgttcctacctaaaacataagatatcaaaatttcatgtgtgacattttaagtatattgtgtttttagtattttatcgacacatcatcttttaatgaagacacaagtgtaactagatctcattttttaccacttggtgataagaacaaggcatatttccactgcattatttggtcattttcatagtcatctagaaacgggcagctatgcctcttagattttctatacattatttggaaatacattagaaaatgttcaatgatactggtgcaggatttttctcgacctctttgccgtattcccaacaggggctctccgtctacttgacccactgcgctcagccccttgtgggaaggagcaggtgaacgagtgagtgggggatctggccagctgctctaggcactgacacaggagcatgctccatgaggggcccatggccagaccaggtgtgtcatctgaaggggaatgtgacggaatccaggtgagggtgcccacgaccccaaaaccccacagtgggtgttacagtactcttttagttctgccaccgcagtctgatggacggtggtgtgttagcagctcagctggccctttgcctcgttgcatggggcagctgccttccactggcaagggcaaagggccaatgtgacagcctttttggatacccatactcagtgagtcccaagctcttgaccaacatacaagaagaatgagctcacaggggcaatttaaggatggtgaaggtgtttaatttcattgagtgatgaaaagggctttcagtgcagaggggagttggagagggagtgggaagggcaggttatcttctccaaagtcagggtgtctcttccatgaagtcaggctttctccctctctactgactgagtctggggtctttataggcacagggaggggagtgcgtgctgattggtttgtgagtatgcaaaaaatgttaacttgatgacaccactcaaaggtgggcacaacactgtagaaaaaacaattaggaaatggtggggatatgtaaaacaggtggaaggtggggatcaatccgaggaaagcatgccacacgggagtacacgttttcaatccagtctgaggaggtctgaggatttaacttgtagtttgggtgtcaggctttaaactgtcttcagcttggaggtgggatttcactgggtacccgcccctatctgcctaggcatttggctgccttctgttgttatcagtattttcttgtagttaaagcttattttacctatgcattttatataaatagtatggtcacagtaattctgtaataatggaatcaaaatctatttatttcaacaacaacaaaaaaacatcaccatgctgcatatagaggacagtttctgtcttttatacctcatgggaaacatggagtagttgcttcaccatgtttctgtaaaataatctttaaaatgcttgaagaattcattcctttgaatgcaggagcttagcaagaaagcctttttttctaatcctctctgtttctctgcatttggtttacacttttattaatctgtggtacctgacacttaattgaatctctacctttccatttggctgagctttagacccactgccaatcttgagtaattatttttctatacatcagctgttccgattcacaagcaggctcttcttatgaagtctgtcaaccttgagaaattgttttgaataaagcaattctttattcctaccaatattccttatttctatccaatattatactgatctgtagaaaaatgtgccttcaacttatattctgctggtgctttaattcagttcaaacaatattgttgttaaacaatattttcacatgaacaattgtttttactattcctctttttgaagtcaatccatcattaaacattgtttatgcttaagtgaataatttactagattaaactcatctacctaagttgaaatactatgaacaaaagatacatattaaatattaacttttaaacaatttttgattcaaatctatttggctttgaaattgctgaaatactctgcctattgttggaacactatgtaatcttcatccaatgaatgttttatttcttaagattttaatgaaaatctccacatatatatatatatatataaacctaaaattttaaaagtcagttttctgaataaactagaatgattttgtaattgagcttattctgcaactggcagttcaatccagaatctgtgcaggaattaaggtcaatgtgaatctttcaatttctttagttactttgtgtattaaaccagatacacaaaacgtaaaatactattggccataaagagggatgttaaataacgtatatttcttaaaaaagaaaaacaacactggcactggtgtcttgataattctccctctttttctgactctttctaaaaatacaagacatgttaagcatattctgaattcctcaacacagtgtatgagaccacaaccctcaaatggtaggatcaagcctgataaagcattctctgcactaagtactaaacaatttgtttaagatgtagctcatttctcacagctcattagctcactgaatgattttgtccaaattatgaaggcaaagtgggtttatattcctagggtgcatctattcttcttctagtcatgtaatttccacctttatcacttggtctcagagcaaagagccttttcactaatgaaagtattttgaagcattgctaaagaaagacataatgaggatatatactgagtcagttaaagaaatagaggagacttaagaacctgcatactgagaaaaagacttacacaaacacttaacccaagagctctctctgggcttcacggttttgctactttatttagaaaagataatgtgaatagacaaagaattacgccagggtttaagttcatcttgtagcaaaggagcatccacgtgtttctgtggttcgaaattacaaagctatttttatatggtttcgttagactgctgtgtgtagaatcaatttacagcagggacctaaaagcaaggcatttaaatgattctttgagaatgattcctgtaccatgtagtttggggaggtggctattaatgataaagagaaatggagagaagtaacaaaacaagtatataaagatatagatttttataaatagaattattcaagctaagtcttatgaaacttttcaccctcttgaaaagcacatgtatatgtgaaaatataaaattattccagtttgtgttgtgtacatttacaaaataaattccgcataacttcatttatatatatgcatataagttaaatatgtacttggaagaaaatgtaaaaaaaagaaaatatgtaagtagaatttactgaaggtcaaatcaaaataaaatcaacatattacccaactgtaatgtgaagggtagaaattgaaggactactttaaaatgaaacatctaatagatcaaaaaacaaaggcaatttgctgaaagttccaaaatacatcaaaaatagtgaaaacatttgttgtatatataggaaaactactgactatgggtattttttaatggtaattcctaattcttcaaggatatgacaaacctaatttggaacatcaatgtgtaatatgattgtacatgaagtgaaaacacagctaaaaaatgaacaaattaaacatcagaaaattgcccccaaagaataagtcacataagttatttaatttgtgttgcatgaacttatatttttacataataatatgaatggaataaaacatatagtatatattttttttctaaatgggatcgaataactgccttggtaggaacactctacattcgaatattaattacaatattaaattgatctgttgaaaaatgtgccctcaacttatattctgctgggtctttaattcagttcaaacaatatcgttgccaaacaatattttctcatgaacaattgtttttactattcctccttttgaagtcaatccatcattaaacattgtttatggttaagtgaataatttactagattaaactcatccacctaagttgaaatactatgttctcaaagagaacaaaaggtacatattaaatactatttaaaaaaaatttttgattaaaatctatttggctttgaaattgctgaagcactcttgcttattgtaggaacactacttataatcttcatgcaaggaattttttatttctttagatttaaaaccaaatcgccacccatacatatgaaattaatctaaaattttgaaagccatttttctgaataaactagaatgattttgtaattgagcttactctgcaaatggcaattcagtccggaatttgtgcaggaattaaggtcaatatttctttgacactttaatttctgtacatttttgtttttacgacgtttttatttcctctggtaaaattaataaaattcatgcgtggttgaacacttgtactctgttggaccaattaattttgaactttaaaatatgaaatgagcaccttttgttgtactgtgactatatttctataaaaattcacttacttttaattataaaattttaggctatgtaattaatgcataagaagtagattgtcagtcaagttagaagtcaactgttctcaaatattcaaaagagaaattttgaagaactttaatactttgcatttatctatacatctacatcctatggtatattgtataaatattattggcttgcaaatataaaaaatatctcttttgttaaaagaatagtaaataaattaattatgtctaaaatacacatagcctggtttgaaattcatcataagttttgaaatgcatgatagactgtaatgcttccaaggatactgtaatcattaatcatgttctctacttgcagtgtttatctgaaaatatttcttaaatcaatagcttgaagagactatttgatagtgattattagtcatattttattttatcagacaagcactgtttcaatttaaaagcatttagatagctcttacatgcctaaatcattatgtacagtctttacaatttacattataaagtctcctaaactaggtaatcattatcatgatagcaatatataagattacaaggagcagatggcctaacatctttcagctttcattggaaatattttagcaaaaatatatagttaaaatttctcagttataagagattggttttccgaaaatttatgttaatattgataaaattcaatataaaatttactaattttatcatgaatagttttcagtaaatcacttcatgattttcagaaaacacagagtaccattgtctaaattattttatatgacttgaaggtttttgttttggtttaatataaacatttagaaggttttctctcagaaaaaaaaaatcaatatattcagggatatttaggcatcccaaatgctacatatcaaaatccaagtaataaagtggtggaaaattgtaaaaggttattttaacattttcttattttgtgtaacactcttttgactaaggacagctatagaatgcaaagttaagtgaaagtaaagatcaaataactagctcattttactcaagggaaaaacaaatatattatctcactattgtgatcacgcaaggatagtttcagtccccaaggataccctcccaagagctcatgtattagatagcaatgtattaagatgactataaatgataaacttgacattcttttaatgctactcctactgtaaaatttttttaaaaagtgtttgactagatccttccctgctgtcccatttttttattgttttggttttgtgttttggatttttttcttctacactgccaaggttgcagtgagactgaaataattaatggggatggtgaaagtaggtggatacttacgtgataatggaatacccttttaattgtttctgaaacaataacttcctgtcttaatgaacataatttttaactcaataacagtacaaagacaacaaaatcttaagcttcagaattcatgtaatatattgaatatacaaatgttgcaatgtcatttttgtagtagtactttctactactccattcccaatattcagatatcatgatgttgagataacatgtaatgtatgtatgggtgtcagaagcagaggtagtggtgacctcattgtgaccaaattgtaggcaatgtgttctctcctacatctctttgccgtgtcacaaatatgctaaggtaacagtatcagggaagacgagcatattaaaaatcttacatctattattggatttctaatattattaattgactcacagcaagttgtgattcgtttccattcatccatatattctttcacttatccatacataatatttattatgcactttttctttgtctgccattgcaccctgggagtaaaaaggtgaacaaaaaaaaaaacagtacttgccttcatagagctgacaatttagggaggagacaaaaatacgctcaataatgctcaaaataaatatgtaaccaaaaaatggaaaagtaaaaatgagcaatgctaagaaatggtggaagaacagtatttaacctagtatgaggaagaaaagaaagttctctccaatgaaacctataaaacgatcatgaagaatgaatagattaaaaaagtgaaagcacatttagataaagacaatgccagacagaggtaagatggagtgtgctatgttcgtggaaataaatgcaagccagggaggatgaaacaaaaagaataaagaaagagtggagggagaggaggttggagacagtagctaagtgcagatcatcctgggccattctaatggcaaggactgtgtccggaatttattccttctggtgggttcttggtctcactgactttaagaatgaagccccagaccctcgcggtgagtgagtgttatagctcttagggacccaaagagtaagcagcaataagatttattgtcaagagcgaaagtacaaacgtaccacaatctggaaggtaacccaagcggattggcagtgctagctccggtggccagcgtttattcccttatttggccccacccacatcctgctgattggtccattttacagagtgctgattggtccattttacagagtgctgattggtgtgtttttacagagtgctgattggtgcatttacaaccctttagctagacacagaagttctccaagtccccaccctacccagaagcccagctggcttcacctctcaggactttggtaccatatactcatttacagtttccatgcgagggaattatattaagctttcttaatgacattctgattacttgtccaggtgtgttgcggcttcttatttcattcacccagaaactattgagtgattactcgggatccagtgctttttcagcaaacccaaattagtcaccccaaaaaagcaaataatatagaccagaggaactagtgttgcttactctcctagggtatcaagtgtttcacagtataatgcatccaaaaggtaatgattcataaaatatcaatactaattaagaaatacggcaaagtgaagatttattctacctcaatttcaagtatttgaagggactgagagtcaagatcatttatagtgcttctctatggtgacattattttaatggtgtcatttaaatccatttttggtgcaatacagtaattcctaaatgataaattacactatttaatatttcaacagagacatttgttagatatagaggtccaattttttaaatgaagagtttaaagatttgcttgcatcttaaactgaaatcctgcattaaattagtaatttgtaaacttaccatttgatttgtaagaaatatcatatattgattgtaaaacaaatgttatatgttgttttttagatccacttaactttcagtgttcagcaactccacgaagaatccacaacttgaaaacaaaagatgaaaaatgatgagttcacgtacatagctgtactcttagtcccaaaccaataaatcttttgccctctttctaatttatcacatgtttgtaaaagagatttgcttctggggagaacgtgttaaatagggaagttcatatttgaaacatttacatcattttcttgccctctttctgtttaccaacaaaacaaaatgatatttggaaatgaatgattttgaggaaatattatgagtatatattaaaagttttgacctttttcttatttatatggttcaaatgagtgcattgtgagccaaaaatgcaagatggatcgagaatgttcttgttcaactagaatttgttaagaggctccaaactgccgttaggaatcagagttggagagacagtgatttctatgtgtatctgaatgttactgtgttctggctgttatgcaaaaaagaaaagggcataaatagtcaagcagcaataggaagcttactggagcaacagttaatgttacaacttggtgacaggtatgcgattcccattatcccatcaccaccagaggcagctgatagacatccaaagtaagctcctaggaacccaaatgagactgaggaaaacacagggccgcccgtgcactgtggggctttaagaaagaaccagagaacttctcctctagtgtcagtaggggccagcatacataagcaatgccatagttcagatgtttgaatcgcggcagccctctatagccagctcagtgtaggggctgaggtttggaggggaaactctttcccctgatatgtttgggggcagggatacaagaattgcagttgcagttgtattatgtagtaagatctttgccacaccattggtgatgaatgaactgagacacgggtctaagctttgagacagaatgaattaagcactggatttgaaagtgaccaggaccctctctaggattttctccttcaggagctcagctatggacaagttacctcttacttgtcactggcatgtatcaggggtacttttacaccatttgaaggctcaataggacaggtattaaagacttacaattatcattatagttatttaccccctttagcctctatttgtgtgtctctgtgggaactcattcacattcctcaggaagctgctcacttctgtttcctcagaattatttacattttggaacatttccatacaggtgtagtaggagacatgagctatgataaaatggagtcggtttactaatatcttctgatcttgtaattgaattaatgaaactaattttttactctttttgtaaacactttttttttttcctcaaaagcctattactgtggtttggtcagtttcaagtattattaatatatattgagacggagtcttgctctgtcgccagcctggaatgcaatgacggcatctcggctcattgcaacctccaactccctgattcaagtgattctcctgcctcagcctcccgagtagctggaattacaggcatgtgcctccacacccagctaatttttgtatttttagtagagatggggtttcaccatgttggccaggttggtctcgatctcctgacctcgtgctctgcccacctcagcctcccaaagtgctgggattacaggcttgagccaccgcacccagcctatttatttttttctattttatgtaaggaaaaataattgtgtgcatgaatacactcacccacatagatgtataattatgtcaacttatacgtaaacacaaatacttttataaggaagattaagtcacaccatattgtgttagttgtagctgagaatttttgtaaaggttttaagcatgcagactttattttcccttgcatccaactgctatcccaacattttacaacagaaaaaataaaatcgttgctctttctgacccacttttttcgcctcaggatatctttgtctgttcataattggtttactatattcacattgtcaacagaactctgtgcttttcaacatttaacacctgtgaagaactgtgactttactgcaagcaaaaggcatgattggttgcaaaagacctttagctcactagcaggtatgttggagcgacaacaaatatctttcagttcaaagaaatctgaatctgtaatttacagttttctttctctcacaattactggcttactttgtttactttcaaattccttgtaatatctggtgaacttggaagatatatctttagctgtttccagtattctctctaattttattttcatgtttattagcaattttggtatatattttttcttagcaaagatactatatgtttattcagtcttcatctttctttctaaataatatctctcaggcttcttatttatgtgtacaagttctatattatatcagcaaacaaaacaaaaacaataataacaaatgttcatgagtttttagatacatttctcaaatgtaatgctcccaacataaaaaatagcccagtatcatgaaatccttggtggtggaatgaaagcgtaggtcattttgcatgagggcagtggggactccagtaggggccctagtgtggggttaagaacgtgtgggcaacatgaccctttcagaagattaggaggtgagtgcatacaggaaagtcaatgaaatttgttggttagcctacctaggacaaaggattgaatttttttttccttactcttttcttttgtctcttaaccatatggtcttttcctatagaccttcagagttagcaggagatgacttgtagtggtgtaacacctgtcagccttaaataacaagattcagaaaatacaattcagcatagagttttttcaaccccaaagcttgaggatggccacccaggagcatagattcaagttgctatgaatatgcactccaattagcagcagttacaagtgagtttttaagggggaaaaaaagagaggcaatttctaggttgcttaccaagaatttgcatcaaaataatataagctgttaattgattctacattgttctttgtatcgcaaattccaggaacatgaagataatgggtgaggcaactagtcagggaaaaaaatccttgaaaaactattgtccctgggcataggggttggatgggggtggagtgggtgtgactgaagtcctatcttcatactcttgtctctggcatacctcacatagctcacactggtctcagctatttttttcctcacaccatagcactggcctgctatgtatgcagtgggtagactggcaggggaggaggttagattccaaaattgtgtagggcttttattcccgactcaaatattttaccatgatattttatattaaaattatttttagtaccaacatgtcaaatctgaaaataatgttttgagttataaagtacccaaatgacagtgtaagtgttaaggtatttgagaccagtcatatccaaccacagtcttcatcactgccatcttctttcaccgtacctctttgtttttttctcttctgtcagcgatgtgagtttaactccaagtgctttctttccctttgcagaaggactgagccttccaaaagaaggtcccccaaagaatagagttttgcttcactcaattcaagtggacagtttggaaggtgttgaaggtttttgttttgttttgtttttatgagttggagtcttgatctgttgcccaggctggagtacaatggtgctatcatagctctctgcagccttaaactcctggggtcaagtgatccttccacctcagcctcccaagtagctggtgcatgacactacacttgtataattttaaaaattgctttaaagttggaatctcactatgtttttctttcttttgcaccatttcatggatgccaaggagcttagctgatgtatccaaatatgtatgtatgtgtatgtgtatgtgtgtgtgtaactgtcccacatatttttgaaggttggtcagcagagtatataaacacttgtgaggatggagaatataaaccaaaaataaaattataagcaccccaacttactgaatgaacccctcctcttagccaagggccttccaaagttaacctgaaaaactagttcaaaccatgatgggaaggggggttgaggaagcctcattatactctcttctctttggaattcaggcacaactgaccagcctgaacattaaaacagagatcttaacactcacaaaacatactctgtagcaataaggtaccaaattcgaacctgactctctagtatagcatcacatgatagataacaaaccctgaaattaaacaaagtacgttacctcaaaatgtatttctttgacatatcttaaaatgaccctgcaaagctgtctattgtggggggaaatttacattttgtagagaatctccttcacttactaggtcttttcaggagagtctatcaccttttaaggtctgataagaagacctaaaccatctactgtctctgaagtaagcttcctggaggcttcatctgcatgggaagaatcttggttttcacagcctaaccttaccttaaccccaagtatttctttctgttgacttgaactctttaggcaaaacttaactctttcagcaaattgccagtcaggaatctttgaatctctctaacacctagaaacctccttacctccctgaaagcccttcttagagatgtcctgcctttccaccctgaaccaatatacaccttacatgtattcattgatgtctgcctgtaacttctgcctccctaaaatgtacaaaataaaattgtgaccaagccgccttgtgcaaatgttctcaggacctcctgaggctgtctcatgggcatgtccttaaccttggcaaaataaacttccaaactgattgagacttgtctcagatacgttttggttaacacagtaaagatttttatgactggccaaatctttatttcctgaaggtgatatgacccacttttttaggaatccatgaaaaattttggagatccgcaaatgcatttactatctgtaaacatagaatattatcttctattgtgcataaacatttctcaaaatgttcacaccctatttctttaaagaaaatatatatcctctacacctgtttgtgttccttaataacatataattgtctccttgtgaaatcatgcacttctagactttccagatattcctcaccttctgaacttttatattgtgttttcttgaattaattattaataaagtctacaatattcttaatttttcacaaatttattatttattgtttattcccttaagtgtgacctgtctctgcctgtgttagttacatattgctgcaaattatctcaaatgtagtggtttatgagaacaaacatttattatcatccaatttctgtggtcagaaatttgaagctggcttagctaggcaactcaatgtctttcatttggttgcaattaggatgtcagctggggctgctgtcctcagaaggcgtgactagggctggcaccaaagagtctcactcacatggccattggcatagagctcagtcccttgccacccagatctgtccacaggctgcttgaatgatgtattagttcattttcacactgctaataaagacataccagaagctgggtaatttgtaaagaaaaagaagtttaatggaatcacagttctacatagctggggaggcctcacagtctcagcagaaggcgaaagagacatcttacatcatagcaggcaagagagagaatgacagccgagtaaaagagaaaaccccttgtaaaaccattggatctctttagacttattcactaccacatgaacagtgtggaggaagctgccccaatgattcaattatctcccactgggtccctctgacaacatgtgagaattatgggaactacaattcaagatgagatttgtgtggggacacagccaaacagtatcaaatggcctctcaacatagcagaaagagcatggcagaaagaacaatgcaatggatcgtggtggaatttgcagtaatgcaatgctaataataatgaagtctctaaagtcgcacacgccatcaattctactttgtcctactcattagtagtgagttactaagtccagcccactttctaggggagggacttaggttctacctcttgaagggagaagcatcagagttttgggggcatattttaaaaccaccacactgcctatagtccagtgtgggatcctcatatttataaatctagggcatctcaaactctgtgatagaaagttgtggggaaggtgatacaagagaagatggactctcctggcttcctatcatgtattccataatgaatttctttcaattacatgaaacccttcttttgggtccatatgattatactcagtacttttctaatctttggatccatattttctagaaatgtcccttccacttacagattttaagtagctccctactacgggcgcattccaacttctacaataatcttaggagagtttaatgtctcagaaaactccttaaaaggaatgacttttcttaattttagtggcctagatttctgttccatttgattcacaaagtacacattctcatgtaaatgattccgcctcagaaattatcaagtgtggtattcctctctcaggacacaacctctctgctgcttcagatatctccttccttcacttcctccacacctgatctttagcctggctcttacatattctccacgatgctgccaagaaaagagagcagaagcatttagaacaggagttacttttaaaaagaaagttacttttgtcaaatgatgctccaacctatagacaaaatgaactctttgtggataactgagatgcttaagttaaagcaaaaccaggaggccctagcaggatggggtggggagggttggggggttgggcagttacactccatgtgtgctcacaaaatgttgcaaaagtatcacaagacttccgttcgtttctgccatcaagttaaaccaaaataggctacagtggggaatctcccaactgacaaaggactgaccacctagagtcagccaataaagagagacttgtggttttaggcttaagggttgtccaatcaaggctctgatcccactcctcagccttgcagtttttgtctttataatctctaactctccaacgtccccttgaagagcttttaactttgtcctgaaagctacatctccccaacctgtagattgctttccgaaaataaggtccgtgccctctctctctctttttgtctctgcagatttcatggccttttttttaacacttttagagaatgaaaggcaatcaaacaagaaagtctggttcaccaaataaaagaatacaacaacatttaaagaaaaaatatctggaaaaatatgactaaggttatgaaatttatggtatattcatggtagacagtggtaatattttattcgcaaagatcatgctataaattcagatattgtcaaagcaaataaggaaattgaggagaaatgtctttgttaagaagttcaggtttattgttttgtgtgcaaaatttctcccttccacctgcaacttggctatgtaagttgtgcttaatgatgttggaagtagaaaaagctaccagttgttgtttcttcagtgctaaaaccactttctttggagtcctcttgacctacctcatgattcatggtatgaatagttgagtcacgaggtctcttaatcttcttaaaaagaatctatcactccagtgtcagtcaccagcaacctcaaagcaataaacatatgtaatatactgaagtgatcagatacacctgctgctgccctgttccacctgagacctgaacagataaaagtgaaacatcacagagataaaataaaaacagacccacctgggagaatcatgaaagcagccaggtcctgaccttgttcaagaggccttgggaggctctgcctgagagaacactgaggacttctttcaattttggcagctgctgctagaagctctggctgagagaggtagcgatcgcccagctgattgatgtctgaaggacttccagaacctttcaactcttctgttagcatgttgacctcccaaaccatgctgtgtttcgccaccctagtcttattactgcctgtgtactgaatactagttgttcaactggtagtgtgtgaaggtcttgcagcaaacaatgaatttgagcatatataattggctttgagtcactgggaaatcctacaacttagttaggtcagagttagcacacctagaaagtggtgaacctaattaacatatcaattggtgtggctaataacagacatcatcctagatttagatcatcttaaatccaacaagtatctttataagagaagagaagacagacacaaatggaaaaaagccaagtgaagatgaaggcagattagagtgatcctgccacaagcctggagccattaggagatgaaagaagcaagaaagccttctcctctaaagccttcagaaacagtgtggtcctgtcaacacattcattacagactttggcctccagaattgtgaaagggtacacttctgttgttttaacccacaaaatttgtagtaattttttatagcatccccaggatactaatgtagagtgcaaagtgggggtatggcacgtgactataaggtgaaaagtggttgggtggggaggattctagctgaatcctctaaggctaaatcctctaaggttatttaaaagtaaataggcttttctaatgggtggatatttcatgatatttcatctgtggctgactgtttttatttttttttctgaaaatattttccaaacccagaggtgagacagagtttatatgcatgtcagagagaattctaggagcagaccccaggaacattctggaagtgcctgggagcccacaagagccaatgtaaagatatttacatacgcccctattttctgtccattgcctcatttttgtctgcttctgtgccatataccctggagtcaggatcactgtggttcaatattcccagagactaaaattctggtcctcttagaagcctgggagaagaaatgattcagccattcatccagttcttctaacttcagccccaaatttttcacctgacctccacagtccctccaaactcaaaacacctcaaggagtcaagtgaatgcgactagttttatctctatcattacccctcttcatccttaggttccagctttctctgctctgctagagtccatttcctccctttcttttaaaatacatagtgacattgtttcttcaaggtgttttcttttctattttttttctcatggacctgtatgcctcttgccattttagttgatgttctaaaatgcaacaaaaataaacaaacttgttcactctgatggtcataccatcattctcctctttatattttatctaatttactgatactactgtccatcaacttaccacagctacaaagctgaaattcaaatgtatttcttctcccttgtctcccatacaacttaatcacaaagacagacatatcttgcctcattaaaaaaaaatcagtacactaatctctaatgctaatgatactgctttaaaggcttctcatcatctgtcaatcaactactgggacccattgtccctccttttagaatgcatcctcaaacccatcatccactaatctgcagggtcatctctctcatatgcactgctgatggtgtaccttctcttttcaaatccttcaaaagctgatctcatgggtctagatcaatgtgcagcttagcatggaacacagggccttcctgggaggatctcttgacattatctcatccataaattttcactgctcccaggcttatactcaatgttctagaattatctacaatctccataactttgccatttcctcagattaaaatgactttcttacttcatcttttcagtctctgattttccaaaataaatcaggccctttgttttctccaccatgaaaccttctttgttccctgcctcccctacccagcctatcttgctcaaccttgctgacttagtcattgattattttctttgatcctggaagctacctccattattatctttatcataattatttttaaatttttttcctccctttgagaagtagctgttttacagtaggtactggttctttatttaaagtttaattattgcttttaacatagtgataaatacataattgaatttaaagaaaaattaacagatctctttgttctgaataaggaagcagccagagaggtgagagtacgctctgacattaaagtaggtggtaatgtgtattccaattcatttttgtctttttctagtactaacaaacttcattgctcaatgctattacttattacttcttgaaatgttgtctcctaccttctcctactaaatactccaactcaggtcagatacagtgcattttcaaagctccccatacaaaaaaagtcttatattaatatgatccatcagaaataatgacattcagaacttattccttttctgtgctgcaaggtcaattttcctacctctattgaagcattcatcactctaagcagcaaagcaaaatcctcccagaacttaagaatagaattatggtaatatcaacttgcagtggttgacctagccttgcataaagtagaattattccaagcaataacagacaaatgggtgattaagcattttttttcaaaaaagaggtcaggatcttgctttagaaaaagactacctgtatggacaggcttaagtctgttgtaaaattaatgtctaaaatgaagaatgtttcagtcaggaacaaatgaatgttcagtggagaaaaaagggaaacagtggaattctaatatgcatctagcattgattggggagatgaccgtgctgaagagtacagactttctatcaaatttggaggagacacacacatcatacacacagacatgcacacacacaggtgcattctcagataggttgatgatatcactgatgaattttggttctgtttacatagctctttctttcattatcctgagaagataaagttgttctttccatttatatatccaagcatacatttactgctcaagaacttttattaagtgggtgtgtatatgtacaatattttaaacacaaacatatgttggtatattgattataaatctcagttacaaactatgattacatcagttcaattcttgggttgtgattttataagccttatgaaaaactatgttgatagtgagattgctcgacagtttcttttatactgtttttctttctcactttgattgttattgtgcattccaaggtaacccttttatagaagcagagccaagaataacaacattatcaatcttctctactttcaagttgaaatgtgatgtatcagtcactaatattccaaacactatgaaataaattgtctggagctttgtggctccttctttttcctacctcctttgttttatttgctttgtggtgtataataacccttgacatgttatatttaattattttaaaacatggtgcatcacgtatgtcatgtcccaggaggtcatgatttaacatggaggagaggaatattcttcagaaacaaaagcagatgctagagaattgaagatgtccacacaattacccagtgtaacaaaaataagctatatacatattcttcctgacttttctttcttcattgtgtgaaggacagttttatgtctaattttctctttgggttcatcattttcatgagcatgtaatgtgccaaatgtgaatacatctagtagatgcagtagaagatgctaacattctggatatattccccgaacagccttaagaattcaatcctttattactatatctcactatacttgcaatgttgtaaatagagaaaaaataaaatggacaagattaaaactgtaaattattgcaactacctccccccaaaataagtgcttaaacatgataagaatatttcctttgtgttttagaaacaaatgttgcactataattcatacaatttgttctaagtctaaaagagtcccaaaatactaatatttagatatttaaaactgaaaatagatagacctatatcactgtaaaaatatagacactggactttgcaaatcatgaatcaacattgggaaacagtcattgtacacatcagtgaacatatgaaattcaaggaggacaaaagaacaaacccaatagtagggatcataattcaaatcaacaagtcaacaaagtctcacatcgccttttaaatttttatttacaaaaattttctcacttactaccttcagtttgctccggcctcttgttttcctttcccgtttatctttattctttttgtataccctttaaactcatatccttcatcattttccacaaaattactttgtctttcatatttagaataaactttaaattgaaagcaataggattattaaaaaaattttaaggtgcacggaaggacacagacacctgatcgttaggaaaacataaacaagaggtcttgaattggaaggagtcatggaagatctgcaaacccaacagtcttctgtgtgtttctctcttgctttctccatttctaatcccccattctttgtcccttctcccccttctctgtctctctctctctctctctttgctttgtggtgtgtaatagcctttgacatgatatatttaattattttaaaacatggtgcattacatatgtcatgttccaggaggtcatgatttaacatggaggagaggaattttcttaggagaggaattttcttctacccctccttctctctttctttctctccccctacctccttccctttctgtttctttcttctttctctttccctcactccagtctctccctgcaagcgtgtctccatctggagtatctgcctttgatttctctgccttgctcaaggtccagtgtgtgatcatgccataaagcacatgcctttccagctttaacgctgtcatcaggtgacttaatttcttagcttttcaagtccattgagtaccatgtgatttgtctagcttctctatttaacagaagccacaaatcaaaggtagttaaccgggttattgaatggttgtcattgagtaggatttatactgctttatcaattgtcaacagctgcggaggacagaaacacaatgaacaaaaaaatgcagctttctcttcaggtggtgataacaagttctagtacacatagaaatcctccactgctttattttctctgtacatttgatttccagtcacaacttgcctttatatcaattcaatcaacacagagactattgactttatacaaagcaattattaatttcctcatcctcacatttatttcacactgttaagctgaatttaactttgatatcaaatgaagtttatgttcttgataatattttcaaaacaaattattcaaacacgtagagtgtgtgtcttcaaaaagtaacattcaaaacaaatggggctgggtgcagtggctcatgcctataatcccagcactttgggaggctgaggtgggtggattgcgtgaggtcaggaaggagttcaagaccagcctgaccaacatggtgaaaccccatccctactaaaaatacaaaagttagcagagtgtggtggcacatgcctgtaatcctagctactcgggaggctgggtcaagagaatcccttgaacccaggaggcagaggttgcagtgagccgagattgcgccactgtactccagcctgggtgacagagcgactccctctccacaacaaaaaaaaattgacattttattttaacccattatacaatcttcaccttcaaaacaattccttgatgtttttcactgtagtcagtaatctggtgttgattgaacatttgacttctgcatcatagaatgcattatactaaggtaagactctgccacactgtctgattactttatccctgcccttccctattgggtaggtatttttgactagttacctcgtgatttcaacagggagccaatagaaattcaacaattagaaagccatgtagaaataattaacagctatgtaagtataataccttgtctaagaagtagaactaaatcaacccctagctactccccaggactttataacttaaatgtagcccaaagtaatcaaacaatagtgtcaactcagctaaacttctttccccctgtgttttgtgaacgtcggaagattttagtctgggcgtggtggctcatgactataatcccagcactttgggagactgaggcaggtggatcacctaagtttgggagttcgagaccagactgaccaacatagagaaaccccgtctctactaaataaataaaaattgtaaaacctcattaaatcccacatctcatttcagtcatctttccctttcacagttaaatctcttaaaagacttaaatcagtgattccaggcctttaccacatattgtttatgctactgcaatctgatttcctgcctccaccactgtattttgctcttgtccaacagaacagtgctaacttttctgtaaagggtaacttttcataccttatctatcctgacttgtcagcattagttgtatttattgaggacccttcttcttaaatgatttttttttccatcctggatgtccacttttgcttactggaaattaaccattcatccacccatagaatttgctgtttcttcagaattctgtcctaggctttcatctcttctcacttgaacacttgtgctaggtgatctccattattcccattatttctgttaccatctctatgaggctgtcttcaaaatacatctccagctcagcccaccttaatgagctccaagtccatgtatccacgaggctcctgcagatcccaaagcaccataaatatcaactaagttctctacatgtttcttctaatttggttttgttcgtggttcctgtatttggcagggcttcctggaaatggacttacagatggaaatttgtagctagaaaatttcaggggaatgctgctggtaggagagtagggagagtgggcttagaagaaagaggagctgaatttcaatgcagttgcaaaataggctttagttaataccacagtaagctctaaagctgaaaccttctgagttgttccaaattgaggcaaaacagttgtgtctttataccaaggcattcaccattttgcctgaccattgaaggatggttaggaaccttgaaagatgtatttcctttcggaaagacagatctttaggaaagcctcagatgagccaacagctggccttagtgagctagttggcatcattcctggtagctggatgaatgaatgcctcatttccaaagagtgatgttggaggctcaagaagtatctattgcagtacacaatatccaaaacatgaatcaaccccagcttggtacagattctctaagattcgtattctctttcatggagaaacttagaagaggaaggttaattggacagaggaaagttttacagtggtgtagcaattctgcaggcaactcttatcatgtctgcctagtttacatgacccacaccctctcttcacatctctgttagcctaagtgcattagaaggtagagtgagtcatacatgcattccagaggtgtctgggcttatccatcttctgcatgcatttctcaggatgtgactactgcacttgtccatttgaaatacaagttggacaggagagtagcaagagataccccaatgtttcacctgaatatgaaattaattcttcccggcctcccctgtataatatcacccctagttcctcccttgctaatggtgacactcttctttgatatagagagatataatcactaggtggcaaccacaaattaaagttcagtggtactcttactatgcttcctggtgaaagcatttcttctcaggaaactagaaacttttgacccatggaacctaaagacttggagacaggaaacatgaatttcccatgttggaagtgacaatgggtgaaacacttctattttcattctttgatatctgcacctgtgtattctacctactggggacacaacaccataaaatgataattactttgaaatgaatgctgcactatggaacatggaaccatggaaccccatcatttaaaagtatcacttccaaaagggtgcatcacctgcagctttaaaacatatttctttgctctatcgggatagtagtttctgggtgttatgacttgcaatgtgaccggcagattccatggtcatgagttccttgtcaaaaaagacagttttaaaaaatcaaatgtgaaattacacatctgcaaatctataaattttatatggctaaagccctgtgggcaggaaagacaaacccttagccggaatagatactgatctcatcaagaagaatcactgacctttcagattaaaagtagtaatacctaataaatgtgccaacaggttttgggggttcaacattgatttattctattagatatttgaacattaggcttgggcagtaaatagctatgatttctgctactatggctactctgttatgaattatttagccaatatgcaatgacagaggtttgctgatgcctgtcaactatgccattctgtttacatggttgcttagtacctgtattagtccattttcatactgctataaacaacttccaaagactgggtaatctgtaaaggaaagaggtttaattgactccctgcagggctggggagacatcagaaaacttacgatcatggtaaaaggggaagcaaacacatcctacttctcatggcggcaggaagggaaagaatgagtgctgagctaagggagagcacctgataaaaccatcagatctcatgagaacacactcactatcatgagaacagcaaggaggaaaaccactcccatgattcagttacctcccacaaggcctctcccatgacatgtggggattatgagaactacaattcaagatgagatttgggtggggacacagccaaagtgtattagtgcccactccaactctgaaaattgtgtatcatcccaattggtgttcttatctgaattgcagaattaaaaaaaaaaacaaaaacaaaaactctacagaaagagtggaattattaggttgagaacccaacatgtcctggaaatattctacacttataattaaattttgtgccttattttaaagtttctgccctttaagtaccaaaaataaatatctttttcaaggcagccttctcactttcacagtcacttaaactttgattaacaatgtcagtttctccttatctttctccaacatatatttgtaggacttaataacagccatctgataccacagtccttatgactgccaattcccaccacagctcacaactcttctgagctattgcacaattcagttcatttcattctgtcagtatcgcatctgaattcctcagtaatcaattgtacaactgtagtgaggggctatcactactccatgtgccctccaattttgaattctctctgtctcggtagtttaatggatccaatgaacatgagtcagctttagaaacagtgctctatgttttattattcaatgcatggtgatgcccatgcatcagtgacaacttcaatagtttttgaaatgtctgagtactctaatttttctactgtatgattgccgtgtaattggcattaggtgcattttggggagaattattgcgacaacatttttttttcaagagggcctctacttcaatcaaaatttccaagtctgagtactggctcagctccagaaactgagcaagtgatgatgaattttattgtatcatctgcacttacctcctgatcattcacctttagtgtatgtacatgtttatcctatacattgagaaatactctcattggctacccatctcccgtcctctcagaacattatgttctaatcattatttccataaccctctgcagttgagaatttctgtctcgacgttgtttattgcttaattgtactcctgctttttcctgtatttaaacatagccagctggtccctattattttgagatccaattattcccattgtttcctgttgtttttaagaagaccaattctataacgaaatcccttattgtcagtcatgtcctagagaggacagccatcattgagctttgcagcaatgctgttgtccctaataatagagtgtcttctgagttcttatgtaaaacatcatcagctggtgagttttctgatcttatgtcacatgtctactctacaatgatcattttctaacaagatatttctgctccccttttgacacagccctgacagaatccagtccctagatactctgctggcttttcctagtatatgctgactaggcccctttcttccattagcaggaccagaactaattttacttaaccctcattaataatctgatgaccaagaaaagaagaatggatagatctctaaaaagtggtgggctctattatcaaggaggaggtatgtaattatgatacataaggggtaagattcagacttatatgaaaagaatgaggcacttcttcaggcccagggagttctggagatctggggttttgttgttgtcaaggacattgactcagaagttccccactccaactctgaaattgtgtatcatcccaatcggtgttcttatctgaattgcagaattaaaaaaaaaaaaaaaaccctacagaaagagcggaattattaggttgagaacccaacatgtcctggaaatattccacacttataattaaattttgtgccttattttaaagtttctgccctttaagtaccaaaaataaatatctttttcaaggcagccttctcactttcacagtcacttaaactttgattaacaatgtcagtttctccttatctttctccaatatatatttgtaggacttaataatagccatctgataccacagtccttatgactgccaattcccaccacagctcacaactcttctgagctattgcacaattcagttcatttcattccgtcggtatcacatctgaattcctcagtagtcaattgtagtacagctgtagtgaggggctatcactactccatgtgcctccaattctctggtcctcatggcccatcagccagcaagtaagtgatccagtttcaaaaattacctctttaaagatcatctcccaatacagtcacagtctgaggtcttaggacttcaacatataaattttggtgaaatacattacttctccaaatgtggctcactcaaatgtaggcttatctatatattatttcctgggtttaactctcccagtctttcaggtttggaatggaattccattctcactttccttatatttgtaaaattgaattaaatggctttcaattgaattcccattgcattcttaccattcatgccgtaaaacttttcagatgttatttaattattttcatactcatttacttccctgttatactgtaaattccaaagggaaagaactgttatcttatttactatcaaagcctcaggacctaacacagtacctaacatctattagaatcaccataaataatttgatcatatctttttattgcattattaatgacttgaaggcagagtgtgtgcattgttcaacattgaatcgcaaatactgtgttagccaattttcataatgctatgaagaaatacccaagactgagtaatttataagaaaaataggttaatgaactcaaagttccacatggctagggaggctcacagtcatggcagaaagcaaaggaggagcaaaggcacatcttgcatggtggcaggcaagagagtgtgtgcaggggaactgccctttgtaaaaccattagatctcagagatttatttactctcatgacaacaggatgggaaaatctcctcccatgattcagttatctcccaccagatacctcccatgatacgtggggattatgggagctacaattaaaaatgagatttgattggtgacacaaccaaaccatatcacatagcatccaaaacaattcctatttacccaatggtaagtatataacaattgtttattcagatttacttaactgattgcttaaaatattttgtcaatttatggaacatctacagaaatttgattgcttcagggatatagtcattaactcactttacttgtgtacttttttataagttctgattatgcttaattttgttttcaaaaatgggtcttaaatgctaggtgtgtgaaagagttgaatttcataaaacatttctcagtgtcaatcttttaatattaattattttcctcaaactagtgtaataaaccttaataaactatttgtataaggaactttttttcattaaattttactgagtttaaaaaagcactttaaaggatttttttgaaagagtaacatagtacacctaaaaagttatttataatacaataaaataagatatccaggaaagctggaagaaaggaagtaactggaaatatgggaacaaatatctttgagcatcattttttttttaacctctgaactttttattggcctcctgctccccaaaggtactctgcttctgctggcttaatgtctgagaacttcggtgtcattggtcccagacaccactttgccatccactgtctggcaggtggcagtcttttggatggtttgcatagagttgctgctgtccagggcattaccaagattgaagtcctcaccatcttccagcagggggtggtaggtggcgatctcagcctccagcttgaccttatgttcagcagcgcctcctactcctgggcctggtgctgcccctctgcccaggtctgtggcaactcggactccaggtgcatcagggtccccttgggctgctccatttgcagggcatagcgggcctccacctccttcaggctgttctccaagctggccttcagatttctcatcgagtacaggtcgatctccaaggactgaactgtatgtctcatccccatgagtatcatctcagcagctccaacctcgatgaactgtgtggtgaccactgtggtactctcctcaatcagccgagactagtatttgtccagctcctctcggtttttccgagccagctcatcgtattgggcctggatgtctgccatgatcttggtgaggtcctgcaatttgagggcatctacttccacggtcaacccagagctggcaatctgggcttgtaggccttttacttccacttcgtggttcttcttcatgaagagcagctcctccttgagagcttccatctctgtctccagctgcagttgagtgacattggtgtcatcagcgatcttgtggagcccatggatgttgctctccacagactggtgcatggccagctctgactcatacgtgactctaaagtcattagcagcaatacgggcattgtcgatctgcagaacgatgcaggaactatccacagtatttgcgaagatatgagcactcaggtcctcgatggtcttgaagtaatggtcccagtctctgacctggggtcccttcttctccaggggctcccggattttgctctccagcttccagttctccgtctccaggctcctcactctgtccaggtaggaggccagccagttgttcaggctttgcatcgtctccgcattctggatgcctcccattccagccagaaccccggccattcaggcagccaggaccccggaccccaaaccgacccggaagctggtggagcaggacaccaagatccgggaaccagagactcggtgcctgcgtagatggtggagaaggtggagcgagtggtgaagctcatgctgtctgggaggagagagagaggagaggactcaggcttttttgagcatcattctaagaaattaatcacagaaattaaaaagtaggaagaatttaaataaaaacctaaattaatatgctaattttagacatgaatgtatgaattagaaaaatgtaaatattttctcctctgagccacaggtttcataacagcagcaaatcataccctcatatgttttctataaccctatgttctcaaacaaaataaatcttgttttaaatacttgaaccccatatgtatttatgagacaatgcaaatccatatcaccttttagaaaatagtttgttcaaagcctcatattgaacacttcttgacaggtaaaaatcctgtaaaaatgagatttaaaacaaagtgcaatagatactccattggaaagacataaatgacatggtgtaaagggaaaaggttagtaaaataattcctattaactctcagaagttttacctttatttttaaaacacagagtatgagcatctagattaacgtaagtaaaaaaaaaaaaacaaaaagcatagcaaatggttgcttaatagagtctattgacaaaaagaaaagatgcatggaatgtcaattattaataataatagaagatatatatgcatagcaatataatattgcaattgcatagcaaatggttgtttaatagagtctattgacaaaaataaaaggtgcatggaatgtcaattattaataataatagaagatatattatattgcattgtttttaatcctttaccaattttatggtacttctgacataatgatctcctatttgagtcacagtctaatgaggcaaatgggccaattaatataaccatttttatacatttagactcaagctcagagcttttgtgatttgtccaaatttacctaggtaaactgcctctagtcaaagtcaccaatgaattctgcattgctaaaccgttggttagttctccatcccagtctcacttgacctagaagaagtatttaccacaactcattattactcccatatctttgacgcaccacttttatcagcctagacagcacttacttttcattttattccttccccactagctgctaccccttctcattcttttggttgctttttcctctctttctgacttcttaatatcaaatgcccctgacttagtctgttttgtgttgctaaaagggatataggggctgagtaatttattaagaaaaaaaaatgttgtttatttggcttgcaattgtgatgtctgaaaaagttaaagattgggcatctggtaagcgcatcaggctgcttccacttatggcaaaaagagaaggggagccagcatgtgcagagatcacatgtggagagaggaagcaagagagagacgcaaatgctgccagaactttttaacaacctgttttcctgggaactaatagagtgagaactcacccttaaggaagggcactaatttattcatgagggatctgcccccatgacccaaatacctcccactaagccccacctaccaacaccaacacgttgggcttaaatttcaacatggagtttgtagggaacaaacatctaaactatagcagccccctttgcttcctctgacatactcactcccttattgatttcattctgcttcctcactaaaagtaccaatcatatcgctctaaaatgtacctctctaactgaattttcctcttatactctggatttatatatttgactacctatacaatatatccatctgggtatcctatagacatctcaggttacacatgcccagacctgaattcctgattgccttcccaagatcttttgtacctgtttgctttgtcatcactatagatgggtaatctaccttttaatcaggcagcagatcctatgagacgaggggtgagatttgatcattggctttagtaatgtacaagtcattgctgaatttgacaagaggtaatttacttatgcaaatgcatgagttacaatatcactaaacttctgttagagaatatataaaaatattttaaagtactgctaaaccttgttacttccactcctcacaccctggtcaaagccacatcatctctcacctggattattgcagtaaactctctcttattaatttagtattctgcttctacatttgttgatcctccacctaggctatagatgctcctcaatttacaatggggttgtgtcccaatatgcatattgtaaggtgaaaatctcataaattaaaaaaaaacacgtttaacacacttagcctatgaaacatcatagcttagcctagtctaccttaaatgtgctcaaaatgcttacattaccagttaggcaaaatcatctaacacaaagtctattttaaaataaaatgttaactatctcatgtaatttattgaacactaaactgaaagtgaaaaacggaatcgttgtataagtactcaccattaatgtacagagttgaaagcatgttgggcctgaagaacatctgaggtattgaattaaaattaattgcaggttgcagaggatgctacagtgacaggatcatcaatctctgtctcttctgatgaggctcaagaatagcatgcagaggcactggaacatccacacttgtggatggtttaacaggaatagtgttcttcaaaattattttaagtattggttgtttacccttgtattagtccattttcatgctgctgataaagacatacctgagactgggcaatttacaaaagaaagtttaattggatttacagttccacgtggctggggaaccttcacaatcatggtggaaggcaaggaagagcaagtcccaccttacatggacgacagcaggcaaagagagaatgaagaagatgcaaaagtggaaacccctgataaaaccatcagatctcatgagacttattcatgaccatgagaacagtatgggggaccacccgccccccatgccatgattcaattatctcccagtaggtccctcccatatctcccagcaggtccctcccacaacacctgggaattatgggagtacaattcaagatgagatttgggtggggacacagccaaaccatatcattatgtccctggcccctgccaaatttcatgtcctcacattttaaaccaatcatgctattcaaacagtcccccaaagtcttagctcatttcagcattaactcaaaagtccacagtccaaagtctcatatgagacaaggcaagtcccttcaacctatgagcctttaaaatcaaaagcaagctagttatttcctagataaaatgagggtacagacattgggtaaatacaaccatttcaaatgggagaaattggccataacaaagaggctacagggcccatgcaaatccgaaatccagcagggcagtcaagttttaaaactccagaatgaccagagagaaataaccagtgcaaaaatcctgttctcatggtcgtgagtaagtcttataagatctcatggttttattagtggtttccacttttgcatcttcctcattctgtctttgcctgctgccatctctgtaagatggaaatcgctcctccctgtcttgtgcaatgattgcaaggcttccccagccttggaactgttaagtccagttaaacctctttattttgtaaattgcgcagtcttgggtacgtctttatcagcagcataaaaatggactaatacaattaattcatgtcgggagtggcgcactgctgagaagatacccaaaaatgtggaagcgactttggaactgggtaacaggcagaggttggaatggtttggaggattcagaagacaggaaaatgtgtgaaagtttggaacttcctagagacttgttgaatggctttgcccaaaatactgatagcgatatggactataaggttcaggtagaggtggtctcagatggagatgaggaacttgttgggaactggaactaaggtgactcttgttatgttttagcaaagagactagcggcattttgcccctgacctagagatctatgcagggtctctagggagagagacgctagagggtctcttgaacttgagggagatgatttagggtgtctggtggaagaaatttctaagcaacaaagcattcaagcagtgactttggtgctgttaaaagcattgagttttagaagggaaacagagaataaaagtttgaaaaatttacagcctgacaatggctccagaaaatttattgttttaatttttaacttttttgaccatcacaaataggactttttatttgacactattgtaagtctgaactttaaacacattcttggactggtggtttatattcatcagcttatacatctttagcacctgtctcatccccagtggcttttccagagctactacctttacccaattcagactagggcttcttcagcatttttacttttctaatgagaacatcataaaggggataaatagactggcaaggcttttctatgtttttccagtgctgcctggaatcaatttatgaaccccttctttcaaagcatttgtcagcacctctccttgggtcatgattttcatcatcttcttctggatttggtgtacctgttggtgctgagcacaggaggtatatatatacatatatatatatacacatatatatatgtgtgtgtgtgtgtgtatatatatatatacccagaaataaatacatatataaatatatacaactttatttacataactttttatatataaatttatttacatatatactttatatgtatgtacatttccttatatatgttacatatatagtcatatatatgtaacatatatactcatatatataacatatatagtcatatatatatatcagctgggcactgtggctcatgcctgtaatccctgcactttgggagacagaggtgggtggatcacttgagtctaggagttcaagaacagcttgagcaacatagtgagacccccttctctacaaaacctacaaacaaatatagctgagcctggtggtgcctgtggtcccagctactcaggagactgaggtgagagaatcacttgagcctataggaggcagaggttgcagtgagaagcgattccactactgcacatcaacctgggcaacagagtgagacctactcgctctctctgtgtatatatataaaatatataaatatatataaatatataacatatattaatatattatataatatataaacatattatataatataatatagattatatattaaataatatattaatatattacataatacattatattatataatatattatatattattattaattatataatatattaatatattatataattaataataatatataatataatatattaatagatgtgcaatataatatattaatatatgtgcaatctaatacatatatgtaatataagtataatatataatataatatatattatgtaatataatacatatatacatatatgtatatacatctcctttactcacatattgccattctcaattagccctatcctgaaattttcatctcccttccctttttaattattacccatatgcctatcatgttctaacacactggatcctttatttatttcttcatttattggcttatcgtccatccattataatatgagctctacgaaaacacacatttttgcttgtttcgtacagtgtagcaatcccagtgccctataacaacttctggtatggtaggtgaatgaatgagtaataaatggcagagtggttgtataaaaagaaacagaataacagaaagatgaaaaatatattttattcagcaactaaagaaactatgaagtctagaatagaataaaagcagataagatagttatttgttcatcaatcatctgcagtagagatagagggtatgataagatgctggaatgagttatacataatagttaaaagttaaaggcagtactcaccgactattagataaaaattggcacatctatagaaaaggaaagagtcatgtgttatactgggttaaatgatacaaacagaaactaggatgacatcttaagaatttaagaaacaaaagaaaatatagataaagccaaaaggctaatgtttaaatgtacttatcagagggtgatataaggtatgaatttataattattagagaaaaaactgtcaggcaaataaagtacacaacacataatgattaataattgagaacaaaatacaataaacaagtggataagtagaacaacaatttttttttcatacttaagaagacagaagatagtactggttatttcattattttcttccaggaaaaagaaactagtttcatgtttgaaacttagaaagttacatcttaatggaaaagatggctctgtcaatgaagctcattaacaaagcacctgaaatactaaaaagccaagtacaaatgttatggttgctttcacaaattatgcgaataaatactcagaagccaaaagaaagcagatagggtacgtaatgtcttgggaaagaaaaaacatgcttaattatcttgcaatacattttttgttaataattaagaagaaagtggggaggggtcaagatggccaactagaaacagctgctgtcggaggctcccattgggaagagtgaacacagcaagtgaaaccagcatcggcaactgaggtatccaggttctctcactgggattgaccaggcagttggtgcgaaccacagagtgaggaaaagcagggtggtgcgacggcccacctgggagctacacggggcaaggggaactctcacccccagctaaagggaggcagtgagtgatcatgttacttgcctgagaagccacactttttccacggatctgtgcaacccatggctcaggagttccccccgtgagcccacgccgccggggccttgggtcccaagcacagagctgtgcagattctcaatggccacttggctggagactgcctaagactatcgagtttccagggggaggggtggccatcattactgtggctgcctgctgcctaaaatgactgagctcccagggagaggggcagccaccatcactgcaggtccagtttgccgtttttttctcctgctggtgccggagagattggatgctttagacctaggaggaattctccacagtgcagcacactggctgtcacagaacacggcctgactgcctcttcaggccagactctgacccatctcttttcactaggtggggcctccctgcaggaatttcagctactctagcaaggggtttagggacagaaccctgatctcccgcatctgagcccctggggagaggggaggctgtggtctccacagatcagcagacctagtctttctccctgctggtcctgaggaatccaggcagttcagatgaatgggattccccacagctcagcacatccctccacaaaggggcagccaaaatgcttcattaagtgggtcccggatcctgtgcctcctgaatgggtgagagacccccaacaggggtggccaggtactttatacaggagcgttcctgctggcatccggtcagtgcccctctgggacagagatgccaaaggaagaagcaggtagctatctcagctatctttgctgttctgcagcctccactggtgacacctccaggtgagggagggacccaggcaaataggatctggagtgggcccccggcaaactgcagcagccctacagaagagaggcctgactgttaaaagaaaaacagacaaatggaaagcaaccatgacaacagcatcaacagaaaagtccccacaaaaccccatccaagcattagcagcctcaaagattgaagctaaataaactcacaaaggtgagaaggaatccacaaaaacatattgaaaacttaaaaagccgtatttcttcttctcctccaaatgatctcaacacctatccagcaaggacgcagaactgggaagaggctgagatggatgaattgacagaagtaggcttcagaaagtggatcataatgaactttgctcagctaaaagagcatgttctaacccagtgcaaagaagctaagaaccacgataaaacattacaggagctgttacccagaataaccagttagtgaggaacatacatgacctgatagagctgaaaaacacaacacgagaacttcaccatgcaaccacgagtatcaacaactgaatagaccaaacagaggaaagaatttcagagctttaaggctgtcttgctaaaataagacaggcagacaagattagagaaaaaggaatgaaaaggaataagtgaagcctctgaggacaatggggttgtgcaaaaagactaaatctatgactggttggggtacctgaaagagatggggagaatggaaccaagctggaaaacatacttcagaatgtcatccaggagaacttccccagcctaacatgacagaccaacattcaaattaaggaagtccagagaaccccagtaagatactccatgagaagatcaaccccaagacacataatcgtcagattctccaaagttgaaatgaaggaaacaatgttaagggcagccaggagaaaagccaggttacctacaaagggaagccgatcacactcatacggatctctcatcagaaaccctacaagctggaagagattgggggtcaattttcaatattcttaaagaaaagaatttcccacctagagtttcatatccagccaaactaagcttcataagtgaaggagaaataaaagccttttctgacaagtaaatgctgagggaattcatcatcaccaggcctgccttgcaagagctcctgaaggaagcactaaatatggaaaggaaaaactggtaccagccactgcaaaaacacactgaagtacaaggaccaatgacactatgaagctacttcatcaacaagtgtgcaaaataaccagctggcatcatgatgacaggatgaaattcacacaaaacaatattaaccttaaatgtaaatgggctaaataccccagttgaaaggccaaaatggcaggctagataaagagtcaagactcactggtgtgctatattcaagagacctggccgggcatgtggttcacacgtgtaatcccagaactttgggaagctgaggcaggcagatcacaaggtcaggagattgagaccatcctggctaaaatggtgaaatgccatgtctactaaaaatacaaaaaaattagccgggggtggtggcaggcgcctgtagtcgcagctactcaggaggctgagtcaggagaatggggtgaacctgggaggtggagcttgcagtgagctgatatcgcaccactgcactccagcgtgggcgacagagtgagactccatctcaaaaaaaaaaaaaaaaaaaaaagagacccatcttatgtgcaaagacacaatttggctcgaaataaagggatggaggaaactttatcaagcaaatggaaagcagaaaaaagcaggggttgaaatcctagtttctgacaaaacagactttaaaccgacaaagatcaaaaacagacaaagaagagcattacataatggtaaagggatcaattcaacatgaaaagctaactatcctaaatatatatccactcaatacaggagcacccagattcataaaacaagttcttagggacctacaaagagacttatattcccacacaataatagtgggagacgtttacacaccactgtgaatattaaacagatcatcaagacagaaaattaacaaggatactcaggacttgaactcttctctggatcaagtggacctgatagatatgtacagaactctccacccaaaaacaacagaatatacattcttcttggcgccacatgtcacttactctaaaattgatcacataattggaagtaaacacttttcagcagatgcaaaagaaccgaaatcataatagtctctcagaccacagcacaatcaaattacaactcaaaattaagaaactcacttaaaaccacacaactacatggaaatagaacaccctactcctcagtgactcctgggtaaataataaaattaaggcagatatcaagaagtgttttgaaacaaatgagaacataaagacaacgttccagatctctgggacgcagctaaagcagtgttaagacagaaatttatagcactaaatgcccacataaaaaagctaaaaagatctcaaattgacacaactaacataacaactaaaagaactagagaagcaagagcaaacaaactgcaaaattagcagaagacaaaaaataaccaaaatcagaacagaactgaaggggatacagacataaaaaaaaatattcaaaaaaataaatgaatccaggagctggtttttttgaaaaaattaataaaatagatagactaataaagaagaatcaaatagacacaatacaaaatgataaagggtatatcaacactgactttgcagaaatgcaaacaaccatataaacaccttcatacaaataaactggaaaatctagaaaaaaattgacaaattcctggacacgtacaccctcccaagaccgaactaggaagaagttgaatccctgaatagaatgataacaagttctgaaactgaggcagtaataaatagccttccagccaaaaaaagcccaagaccagatggattcacagccaaattctaccagaggtaaaaggaggatctggtaccatttcttctgaaactattccaaacaattgaaaaggagggacttcttcctcactcattctatgaggccaacatcatcctgataccaaaatctgtcacaggtacaaccaaaaatgaaaacttaaaggcaataaccctaatgaacactgatgcaaaaaattctcagtaaaatactagtaaaccaaatccagcaacacatcaaaaaagcttatccacggtgatcaagtcaacttcatcctcgggatgtaagtcaacatatataaattaataaacataattcatcacataaacagaactaaagacaaaaaccacatgattatctcaataggtgtagaaaaggcctttgataaaattcaacatccttttatgttaaaaactctcaataaactaggtatttatagaacataactcaaaataataagagccatttatgacaaacccagacccaatatcatgctaaatgggctgaaaacattcccctcgaaaacttgcacaatacaaggatatcatctctcaccactcctattcaacatcgtattgaaagttctggccagggcagtcaggcaaaggaaataaataaagagtattcaaataggaatagaggaagtcaaaatgtctctgtttgcagatgacatgatgctacatctagaaaaccccatcatctctgcccaaaaggtttgtaagctgacaggcaatttcagcaatgtctcaggatacaaaatcaatgttcagaaaacacaagcattcctatacaccaacaatagacaagcagagaggcaaatcatgaatgaactctcattcacaattgctacaaagagaataaaatacctaggaatacagctaacaagggaaatgaaggacctcttcaaggagaactacaaaacactgctcaaggacacaaataaatgaaaaaaaaattccaagctcatggataggaagaattaatatcactaaaatggccacactgcctaaagaaatgtatggattcaatgctattttcattaaactaccattgacattcctcacagatttagaaaaaactaatttaaaattcatatggaaccaaaaaagagcctgtatagcaaagacaatcctaagcaaaaaggaaaaagctggaggcatcacgctacctgacttcaaactatacaaggctacagtaaccaaaacagcatggtactcgtacaaaagcagacacatagaccaatagaaaagaatagagatctcagaaataaaaccacacatcttcaaccatcttgtctttgacaaaactgacaaaaaaagctatggggacaggattccctattgaataaatggtgctgggaaaactagatagctatatgcagaaaattgaaactggacccattcctcacaccttatacacaaattaactgaagatggattcaagacttaaatgtaaaacccaaaactataaaaaccgtagaagaaaatctaggcactaccattcagtagataggcatgggcaaaaatttcataatgaaaacatcaaaaacaatttctacaaaagcaacagtagacaaatgggatctaattaaagagcttctgcacagcaaaagaaactactatcagagtgaacagaaaacctacagaatgggagaacaatctacccatctgacaaaggtctaatatccagaatccacaaggactttaaataaacttaaaagaaaaaataaaactccattaaaaagtcggcaaaggacaagaacagacacttctcaaaaaaagatatttatgtggccaagaaacatatggaaaaaagctcaacatcactgatcattagagaaatgcaaatcaaaaccacaatgagatatcatctctagccagtcaaaatggcaattgttaaaatgtcaagaaacaacagatgccggtgaggctgtggagaaataggaacagttttacactgttggtgggaatgtaaattagttcaaccattatggaagacagtgtgacgattcctcaaagacctacaaccaggaatacaatttgacctagcaatcccattactgggtatattcccaaaagaatttacatcattttattataaagatacatgcacacatatgttcattgcagcactattcacaacagtaaagacatggaatcaacccaagtgctcatcaatgatagactagataaagaaaatgtggtacatatacaccatggaatactatgtagccataaaaaacaaaagaggtcatgtcctttgcagggacatggatggagctggagaccattatcttcagcaaactaacacaggaaaagaaaaacaaacactgcatgttctcacttataagtgggagctgaacaatgagaacacatccacacagggaggggaaccacccacactggggcctgctgggggtggcggagtcagggagagcatcaggattaatagctaatggatgtgaggcttaatacctagatgatcggttgataagtgtagcaaactaccatggcaaacatttacctatgtaacaagcctgcacgtcctgcacatgtatcctggaacttaaaataaaataaaattaaaaaacaaacaaacaataaagctcaagtttcatgataaaataaagaatagagccaaaaagcttatatatcttagggattatttaacagaataatatactatcttaacaatctataaagcaattattgagaacagagtaaggtgtacttcctcccatgaagctcttttaaaggtttatttaatgattatctattttgggaatgggaaaagttaaacaaatttataatcttatgaattagaatttgagtaccggaaatcattacagtttcctccatttcaaaggagaaaacaaaacacacaaattgatattaaaaatgccttggcttaaatttatcaaaaattaaatttatattgtacatgtgattgagacctatctggaaaatattctcaaacttctcttgtgagtgtcaataaatacttatccgagtcttagaaataagttagttaacaataatttctggtttgggcaggaaagttctgggaacatcaccttgatattatgggaagaaattaagaaaagtccactataaaatatctgaatgatgttctcagattggagctctgtcagctggccttattgctttcttatttggatatcatctagggattgaatagctccactctgactcccaggagaaacttggtagggatttatccaacagtatcaagggccacagatggcttaaacaaagcaacatccttactaaaagtagaagaagcagaagggttagaacatgaatgaatgttcaccgtatctatatatattcatttttctcttcatttttgagtggttagcattaaaaagccaattatatattccaagtataaatttagattaagaagaactgaaatagattatttctaatttgcttatctgtttcagaaatcaaccaagaaaatctcctaagacttgaaattaaaatatcctccccaacagtggtgagcataccttaaaaattaatgtcaatcagaaatctcagaatgtgaccttatagagggactttgcagatatgattagttaaaatgaggtcatcctgaattatgatggaccctaaatccaatgactggtgtcctattgagaagagaagaggacacacgaatacatgaatactgaaaaaaaaaaaaaaaagcggggtggagcaggaacagggatgcagaaatgaaagtatgctgctacgaactaaagtatgccatggtacattagaagcccttacagttggacaaagcaagaaagaactattccccggagcctttggaagaagcataaccctgccactacctttatttcagactttcagtctccataactgtgaaagaataaattcctgccttttaaaacattttgtatttatttttttgagacgaagtctcactctgtcgcccaggctggagagcagtggcacgatctcagctcactgaaacctctgcctctcgggttcaagcaattctctgcatcagcctcctgagtagctggaattacaggtgcccgccaccatgcccagctcatttttgtatgtttagtagagataggatttcaccatcttggccaggtttgtcttgaactcctgaccttgtgatccacctgccttggcctcccaaagtgctgggattacaggcataagccaccgcacccggcccaattactgctgttttaagccacccagtttgtgataatttgttacagcagcactaggaagctcatacacgcactgtaaataaaatgaggatacatgagatgtataatcatcaatctgtgacaattatcccaccaaaaaataatttataaataaatagttgaaaacatttagaaacatccaatttctattctatgtgctctagaagcagagcataacaaatatgctcaaactaagcaatgacgttgtcctctagggaagaaagagcaatataaaagaaggtgataatcaatagagcctagtgaagcaggaaccaaacagcaaatttttttggggaaattctttgtaacttcaaagataaaagacattccaaccagctgatttcagcatatatttaacatacatttgataagctgacagtaacattatgccatcctagaaagttatattttctttgtaaataaattaatgcctataaaacatgaatgtattgcaaatgtgattaacgtatttatcctttctgaatacattaataatttcaaactaaaaactttgaagtgaggactggaacatggaatgtaatgaccaagtcatcattcattagctttacttagttagttggttatctgccaggaagtcaagtatttattaagcatctttttttttttttttttctttcgagacggagtctcactctgtagctcaggctggggtgcagtggtgtgatctcagttcactgcaacttctgcctcccgggttcaagcagttctctgcctcagcctccggcgtagctgggattataggcgcccgccaccacacccagtatttttttagtagagacggggtttcaccatcttgaccaggctggtcttgaactcctgacctcgtgatccacctgcctcggcatcccaaagtgctgggattacaggcttgagccaccgcgcttggccctattaagcatcttttttattaggcaacgaaagaagtatgctgacaattatttccctaatttcgtttataactttcccagaatttattgcactgttactctttcaaattgcaaaaaaacacaaactccaattctctaacttacagttatcttaaattcaattatgtatcttacatctaatagttggcctccaattcaccctttcttccacctttatttgatcttccttgcatcagtgtccaattgagaggcagctatcacaattcaacttgaacaagagaagtttaatataaataatcattaacaaggagagcgaagtaaccacagagtagtaaagagaaatttaaagtacacaaggaaggaaggataaaatttggagagtgttcccttcccaaaagctaggttactgacttcctttggggaaatcgtggcagcagcccattggatggcagaaaagttcatggggctgccccagccagagttggcccactatttccatgttaactggaaacaccccatagggtgtgttgatgagtgaggctgacagaaaggtgtgcagaagtatgggtttcagggggctaagtgtattgcacattgttggtagagctgcctaaagctatcctcttaccttcataggtgcaggcctactgatgctggcaagcaagagtgtagggcgagctggagcttagggaacctcctagctgacaaagcagtgtgaggtcttgggagcacaatgtctgtttcaggagggccatagaaagatggtcaccaggccagggccagggctgtaagcttgctaagagactgtgctctaggctttaacagagtccctctcacagtgatgcagcagagcaagaagaaacaaaaatagcaacaaaacagtattagatgatgtgttggttaatattgaatgtcaacttgattggactaaaagaggcaaagtcttgttcctggatgagtctgtgagggtgttgctaaaggagattaacatttgagtcagtggacagggagaagtagacccgccctcaacccaggtgggcaccgtctaatcagctgccagcacggctaggataaaagcagggagaggccgggcgcggcggctcacgcctgtaatcccagcactttgggaggctgaggcgggtggatcacgaggtcaggagatcaagaccatggtgaaaccccgtctctactaaaaatacaaaaaattagctgggtgcggtggcgggcgcctgtagtctcagctactcgggaggctgaggcaggagaatggcgtgaacccgggaggcggagcttgcagtgagccgagatcgcgccacttcactccagcctgggcgacagagcaagactccgtctcaaaaaaaaaaaaaaaaaaaaaaagcagggagaggaacgtggaaggtctagactagctgagttttttggcctccatctttcccccgtgctggatgcttcctgccctcaaacatcagactccaagttcctcagcttttggactcttggtcttacactggtagtttgccaggggctctcgggctttcaaccccacactgaaggctgcactgtcggtttccagagttttgaggttttgggactcggactggcttcctggctcctcagcttgcagacagcctattgtgggacttcaccttgtgatcatgtgaagtgatcacttatccatgtgagtcaattatcctgataaacgccccttcatatactcatctatcctaatagttctgtccgtttagaggaccctgactaaaacaggtgacaaacaccttggtattgcaatgcaatgtctctctatcgccgtctactggcaaagattaatattatgtgtttaaaaagctctagtgcagatcaggtaaagaaatgtgcgtttggagccaagagcaattcactgaaacctagaacatgcttcattgattctcggaaacaagtatttataaaaccactgtctcaaattcacatgggtatgcactttgtgactaggtctcattttccattgccactgctatttttctgtatccctttctctgaaaacagttatcttcagagccagcatctcacacaattccacggggccgcgggggaggtcgcggagggtgggggtagtaacttacattggattctatatgaatgatccacactattttgagttattcagtggaaagtttgcctgaactacgcactaagacgttaaatattcgcatgtattttaccttggatcacatagtttaattccttatagatattcatcacttccttaagaacaaagctgaaaggttatgctattttttctcttattaatgtctaagtaatacttcaagcctcttcgatcactacctaccttatgctacagatactctaaatgcaacttgtatcattttgccactgggttttgaaatattatccccaagttagattatcactgttttatgtttctgcctatatacgtattctactaaattgcctcacaattggactcacatgacatcttattcattgacattttaaaacagaaactatcactcctgatgaagatcacacatcttaactgtatcctcattttaatacatgcttgagttactatatgacatcaacattaaaatacctgtctccaaatttatgctttgagatcagggactgtgtgtttcagttacataataatttggacaaagaagatgtcagtctatatattttaatctaatgatagattaatttctgataaattttaaaagtacaattttaaaatattactcacctttttgtttattttaaataaaaataaagaggaaaatatattaaacatttaagcaaaattccacaaatatatacatatttttctcatgtgtatattaattggcataatccacctctacccgtatgctgcttggttggaagaacacagagaaatttcagctatttcacgataaagaacaatttctgagaagacacatcttttaaaagtgtgggcccaggatcagcctttacgcatctcaattctggctccagcactttctagctatgcggcctttggaggttagtaagtcacactgagccttgttttcctcatctatcaaacaaagcatgctagtctgaagatgcagtatgtacaaacagcaagttaaaatgcacatgtggaaactatgttcttaatttatccataattatgtgttaaataaattctttattccactggctgatacataaaatctcactttagtcatgttccttttctaattttcctgagcattacctcaattctggataagagggtgattggaaaaatcagacacacaaatagcatggcaagagtatgtgtttgtgtgactggggaccgaggcacactgcatgaggcccagtccttgcttttacctgctgatatctgcccagtgaggcttttgtttcaggctgcagatgtttttcacgtgattttcctcaggttcattatctctcagtgctaactacatgtagtttttggcataagattaatactactacacaactctgcacactctttggcttgtggatttagacatcttagctaattttgaggctcctaaactatggtaggctgaggagatatctcttggatcttaatacttttcttgaataataagggcagaggtttcctaagctctttggaatctacctatattaggatcctctctcccatttactgccccacaagacttggctcaatgtggattgcagcattggacaccttctcagggatccatccgtgactaagatctctttgttttcttctacatcttcctccctatttccaaaatcaaaggaatgtgtgtgtgtgtgtgtgtgtgtgtgtgtgtgtgtgtgtatgtaagaagggagtgtaggagctatgagaaaatacagagttgctagataaatctttttttgataaatagcatcttccaaatttagtgatttcatccaaagttttatatttttaacacataggctaagaatgtaattctttttggttagccttctctgagtcaatgactgcagaaagttcaactccctaaatgacaaaaagagaaggtgtgaaatgcaatattaaaaggtacaaatagggagcaaaggttaatgtatacatttttttttctgctcagtagaaaattaaaatagaagatggatataaaacacaacgaacagtgcccacaacattgaaattgcttaataagtattagtcactacaaatctgcaatcatagcctcagagagcaaagaatggattgcaaaatgcaactgaacaggatagaaaaacagagctttttcccacttgttgtattctcattggaacttttggaatcaaacttcaaaatgtgagaaacacacacactctaactgaaagaaaaaatatatttttcataattacaatgaacttttgtagagacgaaacactgtaaaacaataacataaaatggaaaaacaggtaaacttagccaggcactgtggctcaaacctgtaatcccagcactttgggagggcgagatgggtgaatcacttgagtccaggagttggagaccagactgggcaacatggtgaaactctgtctccactaaaaataaaaaaaattagctgggcacggtagcatgcacctgtagtcccagctacttgggaggctgaggtgggaggatcacctgagcctgggaggtcaaggctgccgtgagctgtgataacgccactgcattctatcctgggcaacagagtgagagaccctgtctcaaaaaaagaaaaggaaaaagtaaaacagaaaaacttttttaaaaagaccaaaaaggagttcatgttctaaaaaaatagttttaaaaatggaaatttaacagattgagtgaaatgtaaaaagctaaaccatgagatgaaagtgaacaaaatagagctgaaggaaagacaaataaaaataaagcccataaataggaactgagaaatagttttgatcaacaaatttttattcataaaatcagaaaattagagaaaatatataatttagaagacattataattgcagaaaatttatagtacactatttcagcattgtagttagatatgatcaccacatttctactttgttaatactaaaaggcatatattatctaactatttattatagctattgccgaaggaggcatttttgttcattaccagtgaacaaggagacaggagaattgttaatatgaactagctaactttaatgttttcaatcagttgagaactaatttattttcttccactttctatttttgttcatgaaatatttctcaaacatattataaccagaacaatgaaaaaaactagcgtgtatatgtgtgtgtgtgtgagtgtgcatgtgtgagaaattttaaacatttgggtaaatcagactcctcaggctaagcattaacatcaaagggaattaatttgattatttaacctggattctgcttgatacatttaatcagattgaaagaattcagaaatttttcttacagcttcttccaaatattagaaaacatgtaattaataagcagtaaaatggatcagttcaaaagttaaagtttaatggatcattttagcaagcaaattatttacagatgttaccgatggaaaataataaactattcaaatatttcttgaaagatttaaaaggaattcacaaactaccaggagatatcttagttaacatgatgatgccccctttctggcattgtaggtgcgaacattcatttaatccaatttgaaaactctccaaggatgctaactggcagtaaccaataaaggaacactagaagtagaaacatatttatgttcccatttcttacaaagtcagtggacaaaagtctttattattgcccccccacccttgttttctgattttctttttcttcttttaatagattttattttatcttagagcagttttagattcacaaaaaaccttgagaggaacgtacacaggtttttcatataccctggtccttacacatgcatagctttcaccgttatcaacatcctccacgagagtgatacattggttacgattgacaaacctgcattgaggcatcactgtcactcaaagtccatcattaacagtgaggttcattcttgatgttgtatattgattttctttctgccaaaaatctaaaaagagttgtccacacatagtatccccttttgacctcccattcactctttactggtaatatttattgtcaattaaaataatattggctggtatttttgtttataaaacagattttgtgaataattattttttaatagaggaaaacgttttgtaaaagatttgtaaatacactatttgtatgtaatcacttctaacatgctgccattctcctttggttatatgtttttctatgtaattgagatcatggtggttatattgtcaggtaacacatttattttttctgtttaacaaagtaatatgaccatttttcatattattatatatgctgcttcaataatgggctgtgtattctattccactgggctatgtgtgcattattattgtatgtctgtgcacaaaattttaattgttacagctttaaaataagccataacatgtggttggataagatcaacaaattgtttatcttcctctattttggtgttcttaaaatcatttcaacattgtaatagtgtctattgagttctttcacatcatttttagatttattccaagattcattttatgttttttagttgaaaatggtatctactattttttaaaatttgttactgagaaaaagaaattcaattgattctttaaccttatatacagcaacaaggttgcactcattaattttaaaagatcttagtagacatcatctgtgagtaatgatactttttgaattatctcttctattcgttaaccactttgctttttttaaaaaaaaattagccaatcttttaacttgtttttgaacatttaaatcattcttaatagaggctttctctatctcaaataaagttttttatagtcaagttaattttgtctgatgtttattatatctgttctggattttatctggttggtgtgtgctagttgtatttttttgcctgctattacacttcctattctcctttatgccagtcttttgtaaatagtatcagattatttacagtccaatctgatgatttctatactccaatcaaaaatattaatacatttatatttcttgtgattactaaaacatacctacatacatatatatgcatagatataatccattccacatatatatgtgtgtgtgtaaaggaattctcctcctttctaaggaggagaatggcaatatatgattaatgaagaccattagcacaaaagaagatcagaaagaagaaataaaaaagagaataaagaaaaagcaagaaaaatagatcataggaagagaatttatatatacacacacacacacacacacacacacacacacacacatacactctctttggatatacacacacacatatatatgtatatgtgcagtaatcttctgaatttatatatatgtaggtatgttttagtaatcataagattactacacatatacatatatagtgtgtgtatgtatatatatccaaaggtgatatatatatatatatatatatctccattctcttactatgaactctgtatttttcttgcattttctttattcccttttttatttcttctttctgatctccttttgtgttaatagtctttattaatcatatattgccattctcctccttggaaagagacaccctgaatctcaatatcttagttcaaatattgaaacttttagtattcatcctttaattcttaattttagttgtatatgtttttatttctcagtttagctctaatttttatagttttgactactgctcactctccctcttggaaattatcttctcatgacttgttatatatgtgtgtgtgtgtatatatatgtatacatatacacatatatatgtgtgtctctgtgtttatatatacatatatatgtgtatatatatatatatgtgtatatatatatatatatatatatatatatagagagagagagagagagagagagagagagagagagaaacagttatatttccccacctccagttttttatatctttctaatttctaccaataattctggtcatatacctctagtactgctactctcaattttattattttattctacatattgtacatttgatggccttcattactattcttttacttgaccaaagtcagtttattttcagtcccttggggaatgcctcaatatttctcatacatcaaagcactctattttctgattctgggcctggagcccctcagtgtgtgatacagtttcctacattttttgcctggcattgaatgttagataggcagtcagagcctgtgcttccttttcactcaaatctatcttttggactccaccaccaaaaaatgtgctctttcatatattaactaggctgtccatgctattcaatccaaccgaagctttcctggcaaaaactgtcttggcagcaatggacattttttaactgtgttttttttcttttttaaacatgtttctctcttggttccagtggcacaacgctttgatagtttactttgacctcctggaatatgccaccgtgcctgacggccaacaactcacttgccatcacagtcctgggccggcaggtgctgtagctcatgccttgaaattctagcacttagggaggctgaggggggtggatcacttgagctcaggagtttgagaccagcctgtgcaatatggtgaaactccatccctacagaaaaaaaaaaagaaaaagaacaaattagcagggcctggtggcgcatgcctgtagtcccagctactttggggactctggtgggaggaccgcctgagcccaagcagtcagggctgcagtgagctgagatcgcgccactgcactccagcttgtgtgacaaagtgagatcctgtctcaaaaataaaaaaaatctcctgggcctttcctcctggccatttctgtagagctggcccaaccagcaatatcatggaattttagacttttcacctattaatagatttggctgaagcaacacatcacaaagagtccaaagcactatgtattgtattccagcagtgagggcaaggtatttccctatggggtcaactgtaaccaatgagaagcaggagataggaaggagattggcacataatttctctctaacttttctcctatttaccactatgaggcctgagtgcaccttgcagtctgagcagagatgttttccctgtgggccaaagagcacatttgtgagccacctgtagaaatgagtcagttctgggtcatctgtcaaatagcaggcagcaaattcatgcctcacgatacaattgtttgcattttcctttatctcactttttgtttgtcacaacaatgccctaaattctcacccactttgatggttaatattgagggtcgacttgattggattgaaggatgcaaagtattgattctgggtgtgcctgtgagggtgttgccaaaggagattaacatttggtcagtgaactgggaaaggcagacccagcctcaatctgggtgggcaccatctaatcagctgccagcacagccagaacaaaagcaggcagaagaacgtggaaggactagactggcttagcctcccagcttacatttttctcccatgccggatgcttcctgcgctcgaacatcagactccaggttcttcagctttgggactcagactggcttccttactcctcagcttgcagatggcctattatgggacttcaccttgtgattgtgtgagttaatactcctccttaataaattcctctttatatctttatacctacatctatcctattagttccatcattctagagaaccctaatacaccccctaaataaattatgagcctctttattttcttccatttctgttttctagaggataaaagctaagatcttgtcttgttgtagatcataatatgatcaagtatctagatatggcgtctggaacataataactactgtgttaccttttgctgaatgattgacttaatatgtgtttggaggttagagaaataggcaaaaagtttaaaaaagcagcacctaatatgcccttggatgtttttatgagctggctgctaacaagcatgctaaaatattgttttagttaatcttcatcacaacactatgaatgtgattttttaaatctctgttttatggatgagagtttggtagcttagagaggttaacgtgacctacataaggctacacaactcatgattgatagagttgggaattgtgcacaagaaatttcatgttcttctgctatttggtgctattttagaggcttatctttattccttatgactctgggttggaaatacatgactgaaaatttttcatagacattgacacaaaatactcccatggcttagaaaaagtcatttctccccctctgctgttctctaccacttaatatgatatattaaaagaagaatctttggagaaaaggagaaattgcttgccatttacttactctgtgaccttgggcaagtaactgagacacccagggccactgttttcttaacgctaacaagaagaaaataaaaactaccttaggaatttgttgccaacgttttaatacacattataaatcttcaataacatcctaccctgttcctttataatgcatttcttggctttcttgaaataaaggaaagtataattttgctcaatgtgaaatagagttagaacaagttagagtgtaacttaaaacagtgaatatttcaaaggttataaatggctttcaaattcaccacaagatatattttgccccagaatgttttaatttatttaaaatgtatttgcatttcctcaatgcatgtgttcattaaaaccaaattaagaaattttaaaactacagtgctaagaactgattattccaagttgagtaaggcaatttttactttgtgaagttcaaagacatgtgctgagaagctctgcagtaaagtgaagtgtaacagatcaggtataagtgggaagaattgtggaagcacgaaatgaatttcaagttaagtagcaaatctaaccccgctcagaaatgacttcctatctttctgtaccttgttttctttcatccttcagcactggcttcaaatctgctgactatgaaatatgtctgctgcttgagaaacatatgcaatgttgtttactcctatgatcttgtgtaatatgcatgatttctcccacttttttatcttgtttttggcgtggttttaatggacagtgttgttttgcttcaagcctcgctgtctatgtcacatatgaacaaaagacattacagttatttaattgtggttacaaaacatgtatcccattccttatactatgtacattttctagctcatatttgtgtcttcaaaatatatctgatggagaaataaatgaatgtgtaattatccagttgtattattgtgtgtgcatttctttgttttttcttacatttatatcatactgaaaacactattttactctgtcatgtatggaacacatcaaggggtgctttgcaacaaaatgtgggtacaaataacccaaaatatttagctgattttgtgagtaaagaattttggtagactttgcaatgcattagaatctgggaataaggtcttttaacctagagcagatacatgattcccatcatgcaacttggtaactgcaccccttgcagctgacagggattgtttttgtggtactataacacatctactcccattctctggctggcctgagccaaatttactttagtcccatatgagccaatgtttactcctgtgagttacatcatagttgttaccaccgtgtgtggtctcactcattctcttctgcgaaactccaagacacaaataatttgaagatcggttctaattcaccttcctctattatcgaagagtatttgtaactattgtccaccttaatttttcccatttattcatgtattcaatcacatataatgcacttaccatgttctaggcactgtacagttccctggagatacagcagttagttaaccagtcaaaaataattgctccgaaggaaattacatcatataagggaagacggaaggtaactttattagtaggcgaaatggtagtttgtgctgtggtgaagtataattagaaagggcgaatgaggagtttcaggtttggggagatgtaattgtaaattgggtgatcagggaaaacttcataaagaccatattgtttagtctctgtacaattcactgtggcatttaacttttaaactatattttctcttagctactgcataaattaaatttaaatataatccattgatccagcaggcatagattttcaaaattgaccataagcagatgacttgtacatgtagtccttttttggggagtagattggttatttttatttttggttattagactttacttttcagagcacttttaagagaaaaattgaacagaaagtacaaagagtttccctatattctctccctctgtcatctccgggttcccctatgaacatcttgccttggtgtgatacatttgttacaactgaagaaccagtactgatacatcatcattgactgaattctaggtttacattaatgttccactcttttgttgtatagttctatacatagtcatttgtccatcattatagtgtcatacagaatagaatgctactatactgtcttaaaaatccctgtactttgcctactcattccttcccctcatcccaaccattgattgggatggcaaccactgatctttttactctccttttcattctgtcttttccatatataatatggttagaatcatacagattttcagacgtggcttgtttcacttagcaatacttacttaagatatccatgtctttttggggctggatagctcttttcttttttttttttttaaacacagagttttcgctctgttgcccaggctggagtgctgtggcacgatttcggctcagtgcaacctccacctcccgggttcaagccattctcctgccttagcctcccaagtagctgggattacaggcataagccaccacacctggctaattttgtatttttagtagagatgggattttgccatgttggccaggctggtctcaaactcctgacctcaagtgatccacctgcctcggcctcccagagtgctgggattacaggtgtgagccactacgcccagacactcctttttttttatcatgagataattttctattatatggctataagcagtttgcttatccattcccctatgaaagaacatcttagttactttcaaatttggggcaattatgatataaactgcttataaacagttgtgtgcatattttttgtacagatttaagttttcaactcattgtggtaaatgcagaagagagtggactacgggctcatacctaagctatgttcaattttgtaagaaactgccaaagtgtcttccagagtggctgtaccattttagagtcccagaaataatgaatgagaatttcgactgcattttacagtcccagaaacaatgaatgagaatttctactgcattttacagtcccagaaacaatgaatcagaatttctactgctccctatcctcaccagcatttgggttgtcagtttctaggactttagccatttgaatagatgtgtagtggtatcttggcattgttttgatttacaattccctaatgacatataatgttgaacaccttttcatatgcttatttgtcatttgtataccttcttttgttaggtgtctgttcagattgttgcctactttttaacttttcaatttgttcagttaggacatttgttttttgaactgttgagttttaggttttaagagagctttttttgaggaggtggttattgtggatacaagtcttttactgatacatgctttgcaaatagttgctcctaatctgtggcttaaaatgtagatatccagatattttaataccatttgttaaaatgtttttaatccattatttgctgctttttcaaaggtcagttgactgtattcatttgagactacttctatttcactattctgttcattgatctatttgtctattattttgccagtattacactgtttgagtagtgagacttgaagttgggggatggcagtcctctgactttgtccttcttcaatattgtgatagctattctgggtatttttcctttccatagaaactttagaattggtttgttgatatcacaaaatagctttctgtgattttgtttgagattgcactaaacctatagatcaagttgagaataactgacatcttaactacagcatgtttttctattcatgaacatggactatttctccatttatttagatattatttgattttattcatcagagtattatacattttctcatacagacattgtatatattttgttatatttataactaaatatctgacttttatgttgctaaagggtgttatgtttatttcaaattccaattgcttattgctagcatataagaaagcaattgactcttatatattaacttcatatcctgcagcctaagttctaggagtttttttttgctaattcttttggaaatttctactttgacaattatgttatttatgaaaaataatatgtttatgtcttcctcccaagctgtatttcttgttttaattgacttactgcattagcaaggacttctagtacaatgatgaatagaagcagtggcaggaacatttttccttcttcctgatctttgtaagaaagattctagtttctcaccactatgatatgaatgtaagatttttgcatatgttctttatcatgttgaaaaagttgccttctattcttattttacacagagtggttatcacgaataggtgttggattttgtcaaatgcttcatcatctattgagatgacttataaattttcttttttagcctattgatgttatggattataaaaattgatttttgaatgtagaatcagtcttgcattcttgaaataaatccacatttgttgtggcgtataattattttatacacttttgtatttaatttgctgctactttcttaaaggagtgttgtatctttgttcattataaatattgatctgcagttttcctttcttgtaatgtatttgttctgcttttggagttaggatagtgatggcttcaaagagtgaattagaaaatgttttctgtgcttctgttttttacaaagagattgtaaataattgacatactataatttattttttaaatgtctggcgaatttaccagtgaaaccatctgggtctgatgcttaataattttgaagataattggttactgattaaattataggtaggtagctatgtagatagatagatggatagatgacaggtgtttaagttttgatagattgtaatttttcaaggaactagtccttttcatacaagtgattaaacttgtagccatagagttgtttataatattcttttattttttttttagtgttcatgggattggtagtgtggcccttttgtgtcttaagctggtaatgtgtttgttctctgcttttcttagtcgggctaggagttgatccattgtattaatattttcgaaaaatcaatttttgctttctttaattttctctgaggttttcctgctttcaattttatttatatatactctgctttttattctaccttctacttacattgtatttaatttcctcttctttgtctattttcctaagggtagtgatacaaatactaattttacatctttttgttttctaatatatgcattcagtgctataatttttcttttattaactgattttgctgcatctaacaaacttttgtaggttctttttcattttcatttagtttgaaatatattttaatttatcttggaacttcttatttaaccctgttttatttaaaagtgtgctgtttcagctatatttctgttatcaatttctagtttaatttcctagtggtctaagagcatactgtgtatgatatctattctctttttttgttaaaaatgcatttatgaccctgactgtggtctagtgttatgaaagtgtcatatgaaattgtaactgtttttgaatactattacaattcatgaagagtgtctaagaacaatgttgtaaatcatgaagagtatctaagaaggtcttgaggcctgtccccataattggcacaacaccgagctcctgttagtgctggtaaccttgtttaattaaagtgaataaatttaaaacgaataggtttgtgaacttgatgaaatattctaaattaaataattaacatagtatatagagaggtaatatactacatgaatgtgtttcttgtgactaccaggtatcatcggcttcagttgatgtataataattaagaatagtaatcttaatcccacagaaaaagtggaaacatagcaaatgaacacatctcaaaattatcctatttgagggcaaaaatagctagaatatgtttacacaaaatacgaagtcgttgtttgggggttctgatggtgccagcacttctttaggctggcagttctgcatgcaacagttatagcaataaaagtcttcaggccattgaaattgtatcctggaagatcttcaggccatatatgggccaaggatagcagctgccacaggaaaaaaatcatcatgatgatttatggtaagcaatttgcccaagctcttacatatcaaatgtagattggaatggcaagatagtttacagactaggtaagattgtgattgtgatttttaaactaaaagaatttaggcatcctttctattaaattccgagcattgtcttttataatgcccattctctttccaattccatgactttacattttcctctacgtattttcttccgctattcaaattccttttgataatgttgatttaatattggataatcaaaacaaggatgagtgagcgaagttgaaatgccttctattaaaacaattggaatcttcttgtcatattttgttttaccttaaatttattgaaactcattttttagaatcataccgttctatttctcaatggaaaagaaagtgttctataataaatgttgaattaaaggtaactttgtatcttctactttatcattttaatccttattgaacattctgttgacattgcataaatacattcttataatctttatacaaaatttattgtaacaaattacatatttgtaaataaaattttaaaatttcccctaaatttaaattgaataattttaatttcttgattttttgaaaccaatattgtgtgtggtatttaaatagaaatctttgaaaatacattcattaaatatgttatctcattataaaatattttcaattactgttttaaataatgaagaacattttatacttttcccttattttcactattttaaaaatttcattaagatgtaagcaaaatggtgaaacaggaggtaccacattcatatctccccacagcaaaagtaatctggcagccaaccatggataaaagtgtcttcgtgggatctttgggatccaggtaggaaaaaggcgtgaatccaaagtagagcccaagaccaacgagggtcattttgagaaagcagatcctcacccgtgacaggctcactgatcagagtccaggatacagacctggaaagagtccttctcattgtgggcttaattacatcccctgctatgagcatcatccaccaagagaccctggagaagccaatcctgccagctccttaggtataaagactactgaccttggtcctagctgtggaccctgaagcatcttgtgacccaccttcagctcctctcagccttgatctgggtacaatcctgttcaaacagggacgcagcagaagacatacccatgtatgcctcaaagttgaggctgccaaactcagtagaactgtggatactgaagcagccctgtaaaccatcgccagccactctattttacagtcccacctacccagggcccaggggaaagagataccaatccttgtccccagaggcaggactgtttactttgatctaaccacagatcttaacagggccctgtgactcacttttgatgtcatcgctgaaaaaaatcattgccacggttaatgtccaggagctttttccctatgttttcttctagaaattttattgttccaggtcttaaatttaagtaactgcccctcccatctatggtctgagagttgtcctgtctacctagggacccaacaagagacacgcctggccatgacccaggaggcaggcccactgaccttggccctattgccagccctactgatcaaggtcctggagacagtctagtctgcctagagatcagatgggatccctgcctgcctgagcccctggtaataggcctgtggatataacagcctcgatgtcactaagctccagccccgcaatcccagaagcaagcacataatctcagagacctgagagcagtaggtctttaactgccaaaagaaatccgtaaagactggaagaggtgtttgatccttcaaataaacagacaccaatgcaataatacacaaattatgaagaatcaagcaaacatgacattaccaaggaaaccaataaagctctaataatggatacacacacacacacagagagagagagagagagagaagagagagagagaagagattttggctttcctggaaaataattccaaataatcctcttaaggaaatgcagtgagatgcaacagaacacagataaaaaagctaaacaatttttaaatgcataaacaaaattataagtttaaaaagaaatagaaaaaataaaaaaggaccaggcagaatcctgagctaaagagtacagtgacaggactgaaaattttaataaacagttgcaatagcagacagtcactcagaagaaagaatcatcaaacttgaagtcaggtcatttgaaattagccagttggtggataaaagaaagtgaagaaatatactagatctaaaattagtatggagctacaaaagaccctgaagagccaaagcaatcttgagtaagaagaacaaagctggagtcatcacacttactgatttcaaactacattacaagcctttagtaatcaaaacagtatggtactggcataaaaacagatacacaggacaatggaacaaaatagagagctcagaaataaactcatgcatacacaaccaatttctgagaatctacaaccatctttgagaagagctctgaaagtacccaaggaggaaagtttcatctcttcaataaatggtgtttggaaaactagatagccatatacaaaatgatgaaactgggtccttttatcatatataagttaacccaaatggattacagacttaaaagtaagatctgaaatggtaaaactcctagaagaaaacatagagaaaaagctccttgacattggtcttggaaataattttttggatattgcatcaaaagcactggttaaacaaaacaaaacaaaaataaacaagtgggactccatcaaactaaaaacttactgcagagcaaagaaaacaatcaacaaaatgaaaaggcaatctcagactgggaaaaatatatgcaaaccacatatacaataagggataatattcaaaatatttaaagaactaaattcaatagcataaaataaataaataacctaattaagaatgggcaaaggacctgaatagatatttcccgaaagaagacatacaaacgaccaacaggtataggggaaggtgcttcaaatcaaccatcaccggtgaaatataaactaaaactataagttattacctcacatctgttagaatggtggttatcacaaagacaggataacaaaagttgattagggtaaggagaaaagaaaactcctgtacactgttggtgggaattgtatattggtacagccattatggaaaacagtgtggaaattccacaaaaaattcaaaatagatctatcatatgatccagtattccatttctgggtatataaccaaaacaactgaaaatagaatcatgaagaattatttgtacgctcatgttcattgtagcagtattcctaatacccaagctatggaaataacacaaatgtccatcaacagataaatagataaagaaaatgtaataaagattacctgtgtgtatatatacatgcaatggaatattattcagacttaaaaggaagtaaatcatgtcattttcaataacatggatgaacctagattgtgctagtgaaataagacaaagaaagaccaatattgtatactacacttatcagtggaatctaaagaagtcaaactcagaatgaaaactatcgcaagtacagaaaacaaaacaccgcatgttctcactcacaggtgggatttgaacaatgagaacacttggacacagagcagggaacatcacacaccagggcctgtcgtggggtggggtgatgggggagggatagcattaggagatatacctaatgtaaatgacaagttaatgggtgcagcacaccaacatggcacatgtctacatatgtaacaaatctgcacgttgtgcacatgtaccctagaacttaaagtataataaataaataaattaattaatttaaaaaaaggaagtcaaactcatggaaatagagaacagaatgatggttgccaggggctgggtttatgagtggggtggatggggagatgttggtcaaaagttataaactttcggttacaaggtaagttctggcaatctaacttacagcatgatgactgtaattagtaacaatgtatcatatacttgaattttgagtcttatagatcttaagtgttctcatcactcacacatataaatgataattatgtgaagtgatgaatgtgttaattagctcgattatagtcctcattttaaaatgtatgtttatatatatataaagtgtatattatatactataacatatatatctcaaatcatcacattttatactttaaatatacctttgtcagttatacctcaataaaatcagaaaacatcattattctataaaatccatagaactgtaaaataccaaatacatctattttcaccttttttcatatttgatacacttaccaatcatattcttataatattaggtgtattattaacatttttgtgaagttgtttaaggttggaatacataaattcagccaatatcaaggaattgatttttgaaatatctttaagatccattatacattttgtcggatgtagtttaagtaacattttcgcattcaataaaatttacctatattcaaccttttatttatcaatgaaaatattcagcattagaagtactttgacataagtaacacatgctgaatcagtttattttgaatgtaaattctttgtaagtatgggtagagacatcacattaaaaggaaaaaagcttatgttttctactctattaaaaagaaatctggtctattagattgttttgctgagtaataaaatattctcagcatagttatcattacaatgctgttcccagaagctcttcaaaatcttaggcaaaacagatttataaaggtggcttttaagataagtcagcattttttacttaactacaactcaagttatcaacacagcctgggcacacagttttactcttaggcatttatttagatccttcaaatcacttacagtgcttgttttaatccatacacttctttggtcctaaacatttgtattaaaatacaaacagctagaggattcataaaatgtactgtgaaaagcagaaaaccaattctgagataagaagagtttctcaatttaaatatgctatacaattttagttaaaattctgtctttgtgagtcactgtgaaaaatcagccataaaaacaaattttcccttttacttcagatgtgtttatgtaaaatattttaataaggaaaaataatatctttgtaggtttactgatatactttcaaaccatcacaaaatgaaaaagaaaaagctcagaattttaatcacaattgtaaaatgaagaatgctttaataatgcaaactgaattattatttaccaatgaattctgtcaggttatttcatcaacctctctactcacatttgatgaaaagactgcattttaaaaactgataaaactacttggaatagtttgacagcgtttgggttatttgaacaaagaaagattaaataatgtattacctgagctcctattgaggataattagtgttttcattaaaaactaaagtaacaaagaaagtgaaattttaagttattttctgtcatattcttataaggaaataaaagttcatttcagctggtgacttggctcagacacatagcactgtcattgccgtgtgtccatcaactatgaataaaaatgcaatgaaggattttctagtggcattttaaagcaaatattcaaacagtccttttcttggattgaagataatttctccataaacctacaaataaagagaatataaaatttttaaaatgttatttttgtctccaataccttttctcacagcgtaatattagtgatgactatttcttgtctttccgctaacaagagtttgcagaactggatgttagtattttgaaatattcaagctttcttctttgaaatgcactaatgcagtgcactaatgcatttcaaagaagaatgtttgaatactttatatatgtattcatatatatatatgaaactcactattactgcgagacaattactcttttattctctacttttcacaactctatacatatacatcatctttaagaaattatagcattaagtctgatgtatacactgtttcaagctgtgcactggccaaatacactgagtgacacataagagcttaaatccaacttgtgttcttcactacataatgaaaagagggatgggtctgtttgcacctgcaagaagggaaatgtattttaatttatatgaggttccatatgggctactcatgtacaagtacaatatcatacatacttttaaaactaatagactgcaaaccacatatgaaatttcctttattttcatattttatatttacattgaaattgaagacttgattctgcctttgattacatttgaattttcagctcttggacccatagtaaaaaactgaaattgcataagaatataactagtactttaccagttttaaaagatcgccatattctgaacccactgggaaagaatcacttcccagagcttcccaattatgtgcctatagatctgaacacctctatttaacccaagaactcatagacttttccataataaagctacaaagggatcaattcatagctcaatagggtgcttataggatcctactgaagctgagagtggtgtatattctgattatgttattctattctaaataacaacctggctaaaagattaggaaaaaaaattatttttttaaatttaaatttctaaattaaacttacatttaaatttttatttgtatgtttctagaaacaccctaactttatttagcgcactccattcacactggaatttttttttctacgtgcgtttttttttgtttggttaattaattgacaaattgatattgtatatatttatggtgggcaatgtaaaactttgatatatatatatatatatatatatacgttgtagaataattgtcgagctagttaacatattcatcacctcacatatagataatttggggggagggtaaaatgatttacaaatctactctcagcaattttcaagtatacgatacattattgttaactgtagtcaccacactgttaaataaatttcccatacttatgcctcctaactgaaactatgcaccctttcacagcatcgtctcctcatatttccatcctcaacccccagctcctgataaccaccgttctactttttacttctctgagtttgaatatttccaattccacaaaaaagtgagatcatgcaatatttatctttctgtgcttggcttatctcccttagcatcgtgtcctctaggttcattcacatcgtcacaaatgagagggttttcttcttttagactgaacactattgtgtcgtgcatatatgccacatttcttttgtcttttcatctgctgatggacacttatgccatatgttggttgttatgaatgatgctgaaatgagcatgggaaatgtccccgaaagtccgtgtgtcagtaccctttttatttaaaattactccgtttccatatgtgttttcaaaaagcaataccaaggggcacacttttcaaaatgcagcatttgctttttgtttcatttcctaaacttgaaattttttaaattatagtgtttatattttaggattttctataactattcattgacataatgtgggattttgctatttatactactttgtagatttgacaaatctccttcccattcttagtgaacaacaacaaaaatatatagtggagagctgtaaatcttgcattacattttctttttttttcttaaatataatttttaaaaattcaatacaattaaaattttgagatttttttgaaattttgagaacgttgtaatttttgtgatctaataatttcttctcagcaagagcatcatatagtacagttccaaagattttgaacttcatcattctcttttttttaaaaaaagtttttaatggcatatttgatatgcatttaatgtgtataatgcatattttaaaaattatgtagctgttattactctaggatgggaaactctcagatattatgtgaatttatgtttttaaatgctgaaacccttaaaagtatttcagatgttacagtgttcttattaaaactgtcatacaatgtcatagagaaaaacaatgaggcattttttctttatcttcttcctcttaatagtttagtaatcaagataaactgatgcatctttgtgagcctccattccactgacgtaaaatacaaaaaaaaaaaacagttattgtaaatgtttaatgaaatactctctgtaaatatagtttatacattgaaaggaactataaaaatggaaattatacacacatgtgcatgtatgaacacacttatatgttatagatatatgcatatatactcactaaattagtgacagtttagaaacttacttgtgtgcaaaattcaacaaaatgtcagaatattattgtttttgtttaaagccatttgaaaaccttcaaaacaaagaagagctgcaaagtatttttcagattttgatatgtgaggaatttgacttagtttttccggacagatgctgaaaacattgaaaatatattaagacttctcctatctaatcagagactgagaataaataaagagaattttgattttgatcccatataatttgttgcacatttcagaaagtcctggaaaatgcaaataatatgtatatatttttaaagcattttctttagttaaagaaaaatggtttccttctgtgattatgagacttatatgttaattcttacacaggtcaaagccataaaccatggtcttatccataatgtaggaaacaatgattagattacaaagtatcaccaaaggatgcatggttatgaatttccatttaggaaaagaaagcattactgtactcatgttaatagttctttttacctttaatctattctgttattctcatcatcatatctcatgtactcaacaaaagtgaaatggaatgaaaagtcctttgctttcttaatgctggcctaaaagccctaacacttagatttgcaatacaatttaaatatgtatacaagtgtctttgtttcattttttaatatatgatacatgaccatccatttattgatgtgacaactgtgtctgaaacatttaggttgctgaaaaaaattctactaaaaaagtatcttaaatagcattgagtctattgttgtatcaaataacattccatgtattagtaactaagagccagaatcacagctctgcggcattaaggatccagagtcctttttatgtttatctttgatatctgtgggttttgtcttttttaaaattatgttcataaagactcttcaccggtgtacattcctgccaacaagaatggaataaagagaaaaaataatgttgtttttttttttaaaaaaaaggtcagaaaacataattgcctacaccacctccacttcgtcctgctagccatatccataatctactgtcaggacagtctttacatgaatattcatatgtccagccccagctagcaactctattgccatagaagaatgcgccaaaaatgcaaaataacttgccatctctgtcaaagtgttgaacacaatctaaaatctagggttgctctgaatttctgagagtctgttagtgttgattgttatactacagtctcaataaaaatggaatctatgtgttttcatgcccagaattggtgtatgcatatacgttgaaagaaaaatgaatttacagtgaccctacttagcttcagctgttttcattcaaacaagtatgtgtgtgtgtatatatataagatatataatatataataatataatatatttatataaatatataatatatataatatgtatatataattatattatatattatatataacatatatataatgtaatatattatatatgtgtgtatatgtagcattcaatatgtacatatgcagatataaaaaatttatccatatgatgcataatcaatgactcaaatttaaacaaaacttgcatgtgagatatctagtatcattaaaagtgattcagaataagcagaactcttagaaagatcaagttgctcttatctatcacaaaatatgtatctaccacaaaatattgaatcatgttaagggctaataaaagcagactcttcttgtatccattctcggccattgcagaattttaacatatatatttttaaactttacattttgtactttattcctggtaatctgatacctcttttcaaaaagatgtattgatcccatagggaagtttgttgctttaggaaggatgctcaaaaaagtagaaggaaggaaaaagatctcttccgggagacctgacaaaatcatttaggtaacatttgtgttattggacacttctagtagcatctctaatatactatatacacgaattcaatagcaaacagaaatgaagcatatcaaataaggagaagaaaatcatattaggacaatgatgagtgctaatcttttgttgtattttcaaagtttctaacatttacaaatgaaattatatgagttgacattactaagaattaaaatagtggatcatgaggtgactaaaataagtacagctgtttcattgcattttattcttcttaattttgctcctgactggtccccatgaaatgctagatgattaacaaaatatttagatagttgaaggaagatatcacttaaaagcattctgcacaagattgccgatcatttcaaaaggacaaaatagtggagaacgtaacacatacattaattgaaatgattttcgtgtgtgagaatgggagcatactaaagaaataaaacaaatcttggcagaatttccacttatgttactctctgtctttactcctatataaataagaaagattgtaaagaaacaaaaaaacctcttgaaccgtctgaaatcttgccaatttttttggaacactaatgaatcttggaaatcttatcattcaaaatatagctgtactacttagcaggtcatcaatagacatttttttttctctctgtattctgaggccacacaggctttctcctttttgttttcctttcaatctaaactctgcataacactttctctacaaaacccttcctttctgttgaggttaatatggcttgtgtgtggcttagggtagatatcatattgccttaggggtgctccaccatctcacactgttaattccaattccccatgttgtttggtcagatactatgagttggctcatgaagaatgaactttcaattcctttctcagtatcttttccctatcatagaggtttagaagtgaaaaacataatttctttcttttaataagggtctccatgtcacctatttctgccaaatgaaacacagtgtaaaatctaacaaggttttttgagaaaaacttgttgtttgaaaaaggcatctatgttgaattttatgagtcaacttgacggggctgagggacgcccagatagctgctaaaacattacttctgagtgtctctgtgacggtgtttctaaaaaagatggacatttgggttggcagactgaataaaaaaaatcactcttcctagtgtggatgagcattatccaattggttgagggctggaatagaacaaagaggcagaggaaggctgaattcactctcactttctgagttggaacatcatcttctgccctcagacattgaagctcctggttcttggccctttagatactaggatttacaccagtatcccccacccaatttccaactttcaggccttcagactgggaattataccacaagctctcctggttctcaggcctttggactgaattacaacaccggttttcctggttccccagcttacgtacttctcagcctccaaggttatgtaagtcaattactatagtaaatcatatgtatgaattcacagaatgagacatatttataggtccttttggttctgtttctgtggagaacttaatacaatatcactacttcctaatttttcttcctcttgcctgaaatgcaaacacaatgacagaggaagagcaactgaagatatttctaagacatacattctctccgtttgagtcaagagttctccataatgcagtcatttatggctatggtttaggctgacatactacatatgatgtcttaactaaaggctggtcagaaaaggaaacgttatgagtagagaagaaatgatgagtaatactaataaggctcaaagtctatgatcacatttctttgatctctgtgaatactgttgatagtttattaatttacaaatgataaacatattttatccatcaagtaagactgcaaatgttattgggaaaaagtctcatttttaaagagaaagtatgacaaaataaaaaaagaaatttatgagaaaattaaatattttatatttcaatgtaaatgttaagtatcacaaagcgttaatcttgcaggtgcaaaaagaaaagtcatcacaatgttaatacattaaaattttttggacaaatgtaatttattagattccaaaaaaaataattctttcatgtatttaaaatttactaagaactgacaataacccattcactgtgctcattgacttggtccttgccttgaaggagctcaatttcttaaaagaaacacaaaatatattaggtaagtgttttactaatattatggttactcactgtaaagcaattcagtctatctgcatatcaaaaaaatttccccccaaaattatacattagtattggcttcctaagatgttaagaattctcagacatagaattatcaggggagagagggtgagcaaaagcattcaggcaaacgcaataacatgaacaaggtttagtgacctgaagttactccatgtgttaaaaactgatattgaatatatacaactccatagctaaaagttaggggcatggccaaagacgaacttggaaaattatgccagtgctggattgtggaagtacttgaagatcgtgctgaatggtttaattaagtcttttactgctggcagtggggagcattagagactaaaaattgcgagagacataaatatatcgaagcttttggaaaggcactatagtagtcagttgcttatgtgctctcagatccactcactgccccagcctagtcctgcttggcataacatctggagtggcacacatttcccaggttcccttgcctatttattgccttctggggagggtcaaccaatagaaggcacaaaagaagattcagagatagaaggacatttgaaagttgggtgtttctcacacatttctctctgacagtctctggcagaagctgcatcttctctacatctccagctcccatacaaccacaccatgtttccattgtcccagctcccttcaggctgatttgctacaatcccacatgctctaggaacccccgaaattgttatcaccacattttcctatgtttattcagtcctatgagtggtagtaacctcctgtatttgttggaattgaagtttcttcatttttgcattttcttcttatgaaaattaggaatttattttccatattaaattctctctattgaattacatggcttgaatttgggtacctagttgtactctgacaagcagaaaattaagacagctttgaaaaaaaatagagttaaaagtatgcttcatctctttatatgcttttgaatgagcagtgtaataagcaacttcatatattaagttgtcatcatgagaatgacctcaaagttgaactggaccattaactggaccaaagttgtttttatttttgttgttgtttttttttaaaaaaagaagaatttttcttttttgttttgccaatctctccattaaagcctctgctcagcttaacttatgattttaatattacctggtgctctttgaaaatgtcaatacaaacaaccaaaatagggctatcttattttcctgttttcttctttgtatgtctttctttttcacatcagtcttctttttaaagacattaaaaatttaatggctcaatggttaaaacagacaagtacttcaagcttacctggcttcattttcaagacaaaaatgtttgtcccagttgctatgcaggtgtaacataaacacatcaagagtaacaacatactgtgtttaacttttaagtcgttgttgtcaccactatatttataacgtgaatttagtaactttaccacagagatagcaggtgaggttgatagaaaacaggaaggaagtgatttgtcctaagttagataatacaatttatttaaaaatagcagttgtaatcattttatttaacttttaacaaataaaatagaagctcattcataaacatttcagatatacaaaagcattaatatttaatcttatctttgaaatatcgtatttgacttctctggaattcagtattttttagataaattgggagatgaaccttatacttagaaatactttaaaggtctttagaaataaaaatggttctgttcttagtcaataacatacctccctttatattatgtaaatgaataagtttcaatgtaagaccaatgtaaagtttgcttggatagagaggtgggtaaataagtacgtttatcttcattaaactttctctaattgtttagggtaaaagtatatttttaaaagcattctaacaatttattttatttctaaaacaatactaatcctggagcacataatagaacattgtaaattttaataagatgtccttcagatttctgagtttgtcagttaagttgaagactccctttgaaaaaaatacttaaatgttccaaatattcccaaacatttcctcaatgcatatcatcaaaaatagctacaatgtttggttggatagtgtctcaagcccatgacttctcattgaaactctgatggttatacgtgattatggtagtgttgactcaccctcagagctacttacattttaagttttacctttttcaataataataatgaaataatgttgatatataatcaccatgttccacgtttcatggtttagcaaaatacatggacagagaaaaagtaaagtttggccaatataacttggctataaaagtcaggcagaggttcctgttttcagtaatctaagtaaatggtccaccaataaaatacaaaaactgaactgacatactttaaatcactacaatactcaataaacataaagactcactataaattgttatgcacacatttgtatttgtatctattgttttcacacaagtgggtgtgtgcaatttacagaacgtttagtttccctttccaaatgagtttactctctttgcattttaaatggaaaatacaagcagactgagttcttttaccttccatgtagactataaagacatgctgtttcctttattccatctacagtagtccgtcctgttttcaaacactttttaacaaaaagaagtatcagcattaattcattcattatttccaatattagtaatattcatagattatttcgatgatataatcaagttgccctggaatctcctctcctcaactgattgtggagtgacagccatatttttaaccagaaaatatttcaaattatggattattttgtttaaatataagaatttttctaggggtcactagaggaatctgagtagcctgataaaggtatataccaaaacaagcagctgtttgcactctgtaattaatgaagtatcataatctattactcaccaagaacattagaccatggataatttgctcactgctctatgccttgcaatatatagtgcctaatataacatagatgctcaagcactgtttttgagttgatgtgtaagatacttctcccaatttgtctaatagtagaatttatgaatgaccagggtcaacataggtggagtcatagaaccataactccaatccatgtgtgcttacatataataagatctcagttactttttcttgaatgatcaggagattaaacataaacatggcaagtttatgggcaagtaaccccaaattacttagaaggcggaaaaattctcaaagctacttagtgaattatttgaaaacaaataagtgttaagagaagaatgttttttaaaattcatagtccagtgttcttcatttacgtaacagaaaggcaatgttctcttactcttccaaaccatagcattagaaaatcaagtctcatatagtcacaatttttaaagaatttgagagctaagatgaaacttatctcaaaaaaattttctcagtaaagacaggaacttgcaatattgtggtacttttctttcacaaacatgtctggtcttcagcacagtcaatcctcattataagcaaatacgtatttgcaaatatgccttctcactaaaatttatttgtaaccctaaaatcaatagtcacagcgtgttgcggtcatttgcagatatgcatgaaatagtgaaaagtttgattcatttgtcactctcctccccagctgaggtacaacaaggcaatgttctagcttcttgtttcataactcataatgtaaatgtgcctttttgtgagatatttggtgctacagttttcacttctttggggggtgattccagctgtttcaaaagacccctaaacaacattggagtgctatgaagtttttctacgggcaggaagacggtgatgtgccttacagagaaattatgtgtttagttaggcttcattcaagcatgagttaaggtattggctgtgagttcaacgttaattaatcaacaatatatattaagtaagataactttacaaagaaatttgtaaaagaggttacgtactgatcagttgatgaaatgtgaccagaggctcccaggaccccaaacttgtattttccttgggaacaatgattcagtattcactaattcagtgttcatggtgactttatagagcataacaaccacaaacaataagatatggccgggcgtggtggctcacgcctgtaatcccaacactttgggaggccgaggtcaggagattgagaccatcctggctaacacggtgaaaccccatctttactaaaaatagaaaaaatcagctaggcgtggtggcgggcacctgtagtcccagctattcaggaggctgaggcagaggaatggtgtgaacctgggagtcagagcttgcagtgagtcgagatcacgccactgcactccagcctgggctacagagcgagactccatctcaaaaaaaaaaaaaaaagaagtgactgtatatctctttacttcatcttgtgacttgtttggaataactgagatctcacctcacctacacacactcacacacaaacataaatgcattcccatatacttactgcaagaataagaatttattctgtatttttacctcaactgtgtatatattcactataagaggattaatagtctggcacagtggctcatgtatgtaatcctagcacttgaggaggccaaggcaagagaatggcttgaagccaggagttcaagaccagcttaagcaacaatgttgtgttttttaattagccaggtgtggtgatacatacctgtagtactaactactcagcaggctgaagtgggaggatcacttgagcccaggacttcaaggctgcagagagctatgatcatgccactgctctctaacctgggcaacagagacagagggaaatcatgtctccaaaaagaaagaagaagaacaagaagattaatagctacataattatttcctctggtaaaattattatctttgtcatagctatgctacagcattttaggtaccacatgtaatcaattccaaattactaatgctagagagaaaaggtagactatagtgaattgttccatcattcttactgtagagagctattgaggcttccaatgaaatgactatgagatcttagagcagctaataacataaaaaaggggtacaagtataccttgttttattgtgcttttcagatgttcctttttttgttttttacaaattgaagatttgaggcaacatctgtccaacaagtatatcagcaccatttttccaacagtatgtgctcacttcataaccctgtgtcacgtttttgtaattcttacaatatttcaatctttattattattattattatatgtaatttttgaagttactattgtaatcgttttggagcacaacaaactacacccatataagatggcaaacttaatcaataaatatgtatgttctcactgctccagctgctgttcatcttccagtctgtctctctctctgtgggcttctctattccccaaaacataaaaatattgaatttagacaaattaataatcctacaatagcttctaaattttcaagtgaaaggaagagttgtgcctatctcacattaagtcaaacactagaaataattaagcttagtgagaaaggtgtgtcaaaagcagagacaaactgaaagctaggcctcctgtgttaaagagttggtcaagttgtgaatgtaaataaaaaattattgaagaaaattaaaagcgctattccagcgatcacatgaatgataagaaggtgaaatggccttattattgatatggagaaagtttgagtggtctagatggaagatcaaactagccacaacattcccttaagccaaagcctatccagatcaaggccttacctcttttcaattctatgacggtaggctgcgagaggtgaggaagctgaagaagaaaaggtggaaggtagcagaggttggtccatgaaatgtaaggaaagaagccatctctgtaacataaaagtgtggcaacaagtgctgatgtagaaggtacagcaagtttttcagaagatctggctgagataattgatgaagaaagctcactaaacaatagattttcagtgtagccaaagcatccttctattggaagaagtgcaacctaggactttcatagccagagaagagaagtcaatgcctggcttcaaatcttcaaaggataggctgactctcttgataagactaatgcagatgacaaatgtaagttgaagtcaatcttcatttgctatctgaaaataatagagcccttacaaattatgctaaatctactttgcctttgctctagaaatgaaagaacaaagtctggagaacagcacatctggtcacagaatggcttactgaataatttaagtccactgttgagacctacagctcagaaaaaaaaagtttcaaaatattccttctctttagcaatgcctctggtcacccaagagctctgatgaagaagcacaaaagttaatgttgttatacctgcaaaaacaacgtccgtattgcatattatggatcaaggagtaattacaactttcaagttttattatttaagaaatacattttgtaagactttagctagcataggtaatcatttcttagatagacatgagcaaagtaaattgaaacctgaaaaggactcatcattctaaatgtcattaaggacatttgtgtttcacagtagaaggtcaaaatacctactttaacagaagtctgaaaacagttgattacaaccctcaaggaagacttgaggggttcaagactttgacagaggaagaagtaattgcagatgtggtggaaatagcaagataaatagaataagaagtggagccttaagatgtgacttaattgccacaatttcatgattaaactggaatgcacaaggagttggtttatatggatgagcaaagaaagtggtttcttgagatggaatctactcctgctgaagaggctgtgaacatagccaaaatgacagcaaagggtttagaatatggcttaattgataatgcagtggcaggttttgagaggacggactctgattttaaaagagattctattgtgagtaaaatgctatcaaatattgtggcatgctacagagaaatcttgcatgaagggaacaatcgatgttccaaacttcattgtcttattctcagacactgtctcagccaccctaaacttcaccaacaaccatcctgaccattcagctgccatcaacatcgaggcatcatcctccataagcatacagattgtgactggctgaaggctcagataattgttagcatttttaacaattaaggattgtacatttttttagtcacaatgctattacacccttaatagagtacagtatagtgtaaatatagcttttatatgcactggaaaaccaaaaaaattgtgtgacttgctttatcgcgatatttgctttattacgttgatctagaaccaaactggcaatatctccaaggtatgtctataatttccaaccatataatttaatcctgttatttaccagtgaagcaggattatgaatcattgtggttcatcaagaaaaatggccttccaaattcagcatttgtattatgcaaataaatattctatagatttactttttttttattttggagtttgctgcatggtttcatatttgtacatgatgctctttaaaccaaactgataaaaacagcatattaagtaatacatttttgttagaactttcaatatttgtatatatattttgaatatttttacttaatattatttaatatagagagtagtgtcctctaaatatagccttggagacaagagttctgccattttagatttaattcatatgaacaccttaacattcctaaattccatattctgttactaattgctacttagcattcaattttcaatatctttgaatttaagctcatagggccctttgaaaatctcctgaaagtaattgttttgatgtagtgatgtcagctcattacctaattcatcaaagtgacactacatttaatagactaccaaagtattaatgccctatttcatgtagagataaaaatccagaaaacgatctagttagaaaatccagttagaaaaaatttgtaacttgaagcttcttgttatgaagtttccatgtctatctgtcattttccactggcaattcatagtaaatgaaattgaacaacggcagacaaaattatttttaaagctacactagtccactatatgtaattaaatatgaccaacaaaaattacatattccattaactatttacattgtatttgccttttgttcaagaattgctaaccatatcaaaatttttctgctcacttttattattagttttaaaatatagaatgaataccaatatccctaactcctgtatctgtaccaaaacatttttggacaaggtcattggttggttaactatttttctttcatctccaaatatgtagaactttttttctgagtaatatttgaggaacagaactacaaattccactaagaacatgcttttcatataaattattctgatgaatccaacaactgctctctatctgccctgtgaccacctggctgcagccatcctcatctcctggctgtagccatcctcatctcccctctggaaaactgcaaaatcctttttttaatctgaggttctactttagtccattatcaaccattggtagcttaaagacaagtactgtccagacaaaatacattaaaacagctcgcacccttgcttggacatttcaatggtttctttttgtccttagatgaaattccaaaccacttttttagaacatacttcatgagtcatcacctgttacaactcaagcatcagtttgtagcatcccctcattttattattttcttattagagtccagaaatacttatattgttgttaatttaactcaagcacattcaagccccgggtgttcgaacactttcttttcttggcatgctgttctctctatcttactcctaacatttgatcatctcctcacagaggcattgctgcaacctctatacagtacagaactatgacattcccagtcactctcagctcacactgcctaacttccttagaaacagggcataaaggcgccatgaggtcagtcaggagtcctgtttttgtcttgttttgtttttcctcttgaaatattccaggaaggccacttatgagaaatccacgttaaatgaacacttccacatactatctgtattagtgaagacaacattagattctgtaaaaaagaaccccccaaatttcaatggcttgagggtttatgatttctgtgactggctaatttcacttagcttaatattctcaaggttcttccagtggttacatacagcagattttcttctttttaaaaactgaatagtattctgttttatcacagcactgtgcacttaaaaatgtaagagagtaggtctcatgttgttttcttagcacaattttaaaaacaaaactttattcctcactcacctaattatgcagtgtttgtaatcaataggttgatgtctttttcacattgactgttctttcattgggtagcttagccattaggtgattctgctgcccaatggaaacaagaatctctgtagaaacagactgtttttagcacaaactctctcaccttaggtttttttttattttttggtttagcttaattaagcataatacggattttattttttaaacaatgatatcttaaaaatctttgtctagcaaaagtcttctcagctctatccctctccgtttttgttacaataacaaaagatttcatgcttatataatctcacagagataaaaaatattaattcattgcagtaagtttctcagtggtctgtcttttcttcagggattttatccaacaaaggaaacaatattttgagatttatcatatgccaaaatcagtagagttcaatggtcaaaaaaaagtacagacaattttagaaaccacaacagaatgtgtctctattttacacattccactgttcaaagggcctttacactcatagtatatgttgtgaaataaacatataatgccaatcattgttctaataattggaagaatatcaggtgcatagtaggtacttatacttgtgaggtcttatgccaatagcataaggtaccactgaggagcccactccgaactttacattagacaagatctgtcaatcaggtaataataaattttgctgataattgctcgacattagaataaaaacagaaattaaagtaaaagtaaacaattataaaggaagacagtatccttctccttttcgcaccagatatctgtatgtttctactgtggaaggaggtacatcaaacattttaagcatgtacattaaacatttctacagtggaaggaggtacatcaaacatttaactccattccttctgcttctgtgctaatctaacttgtgatttaattcagtttttcatacaaatgacaatagtcacgattggtggccctgatagccaccagtcatcagagctactgaagttctcattatggaaaatatttttttgatttattaattacatatattgttgctttaggtatattttgttctctctgtgtgtgtgtgtgtgtgtaagaagcactcaatagctgctcatctcaggaatagtgaaaaaattgagattctgaacctataaaatacatgattgtaccacgttgatgtttctcttctctttttgtctaccaaccaacacctgtgttctttgggaaacatcaggtcttgctcttttttattttgtaaagctttagatgaaggaaataataatactcttgttttcataagaaaaaaagactatagttcaataccaggattttaaaggcggtcttatcacatggtttcttctgtgtaatggataaggcaagatgatctactaagagtgaataggtttaaatatttatggataatagattctatttgagtaattgctgtgaaaaaggtgaaaagtaatttccaggaagtagagcaaaacaaggtgaaaacagaaagaatttgacagcaggttttaggaactattacatttggtgacaataggagcacggtaattcattctttttaaaaaaaaaaaattttcccatagcatgcttcttcttcagaaaaactaagagatggctgatgattaggcacagagtgaggttgttttgtaaaagaccaatctgagggcagtgaattatggagtcaaaaaatgccagcaaaatgataaatgaagagaaatacaagaaggtaaggtctataggaaccattctattaccatcacctcacacagtatgtgatatgttttcggtacctaattaatgaaaccttaagctatataaagttataatccaatatttccatgtttagaaatttataccataaaaatgcttacacaattatacaaatatgtgactacagagatataagtaaaaacattatttgtaacaataaaatgccaaaaataaatatacaccataatgtggaatattattaagtagacattaaagtgaatatgaatctacaggttaaagaaaattatgatctttcctaaaccatcatgaagactagtttatgcaattatacaaaagaataagacaatagaaatggctggatatggaattggttattttcatgcctacctctgaaaatgtttgaaaacagtaaacttattttcttcacttttcacgacctagaaagtggtgaaaatttttataataaaggaaaattttttcattttgttattaaaaatatttcactgccaacctcagtaagagtatatgaatagaaaaaggaaaacagcactttaaatttaatgaaataggaaaaaatagtacataattatttctttagctccttttaaataactctactctaaatgaattctttgagtagtgtggaaaaggtaaaatcaattcttaaactttgtaatttatatatccttttgaaaacctttttgaatggttctgctcaagtgtgtttcattggcaatgaaaattatatgattatatatagatacccttgaattcagtaagcagggattgtaacaaatcagaaaattgtattttaatttgcagtttcttcttgatctactactaatgaaagtttcactgaattatctgcttaaaggtcaaaatgctaattaagagtttctcatcagtgataattcagatatgtggaaaaatgatgacattaggtctttgtcttcttgagttaccttattttgtactcggtcttctcaaaattctgataaaaatgaagacagtttataattaatactttctgtttcataatactttctgtttcattcaatagacattcccctttaaaggaacacataaggagttttccccttttctaatgtaactttatgatatacaccttaataagctaaatcttgcagacctctttttaaactacaaatataatgctatactttagatagcatctataacagttactctttcaaaaatatatgttaaatttttagaattattgatctaccaatttgacatttctacatctagggagaataaatcatttcatgtttactattctatcatatgtgatatatcatttcaaagttcacaacatatactagtctgtgtgttagatagttcatgggacatggatatccatccaagcaagtaactatccctctatatacaaatatagctatggcttacaaaacgaggatacattttaaaaggccaggtcatctgatttaagccataaacatgtaagtatacttaccaacagtaaagactgtgtgtgcgcatgtgtggtgtgcctgattgtttgtgtgtgtaatcaaatttatattgtcttacaataacactatacctaaaaatacttataccacgacatggtcatggtggtaaagtgatggcatattccaaaagcgtacttttaaaaggtctaacagagaaacagttgcaaaggctttgacaaagacttaatgactatcaataaagtatagtgaatatcgttgccaattgtaaccctgaaaaatagtaccccagtaagagttataatagtggaagaaggctgcccaataagggctgtgtctttgggactgaaacagcccctgccaaaaccacagcctgaagaagaatggccaaaatgcttcatgatttcttatcttctgatctctaatcatctgttgttaaacccactgggcaaagacaattaaaatccagagggtaaggaaatccttgatgcagtccatagaggtcagtagtagagaggggaaagaatggaactggagaggaaaatggaaaacatctctattgtatttacagcatgtattatgctcatggattagaagaatcaacaaataaaggtgtcagggtttttttttttttttttgatgtacatatagattaagcacaaaccaataaaatctctagggaaaaatgtttattggaaactacaacctgaattctaaaatatagaagacaaggtgaactggaatagctcaatactccaatcaatttctctgaaaaagaagaaaaaagttaaagcagccacagtacctgatatcaatactcatacataaaactacgaaaatcaagatagcatggtatagatgaaaggacaatgaaacagaacagagtatagaaatagacccacatatgtaagtccttagtaagaggccacagagtccttttagcactaaaataaattattgcaaaatagtacacagttgatcaaaactaaacaaatattctgtaggttttcattgtattaagtcttaaaataatatatttaattgaaaacacagcttctaatgagacaggaatatctctagtttttccaatcattacttttatctatggatgaatgttatttattttcagaatgagacaaaatttcagtattctacttctccccaccctttttaaaaacaactctaagcacttaataagttgctttcataaataaataagtagaaagaaatggaacagacttttcataacaatataacatgtttattctacgttttcctaaattatatccaaaacttactacaatttaatataaaaatgtttattagtaaataattagattaagtttttttaattttactaaaattatgatttagaaatagcctaaattgaaaacggatttgattagttcaattcttccttgtaaatatatcattgacaggaattatcacattttttagaattttacactgtagggcagaataacattataaatatgggtaaaatatgtcattcccttgaaaatcagaacaaaagtggtcctttgtaaaggatgcctgagtaagggatactggcatagccactagcctatggaccttttctgatgcacatcaactttagaaaattggacatttaaatgtcccagtttaagactattgctctaaagtagagtagagggaaaacactgtatttactcagcatataatgctttgatttcccctgattataaaatatcctgagaagacccattaatcagtcatatatctgctgaagctcttaaatgtctttagtcctttaggacactcgagtttataattaaaaacgaattatgaaatcaagataattacaaaatcatacctttaacaacatattacaattaattccaaaaagaaaaaaaatctacttcaatttgccaagaaccaattaatattaaatgcagcattacttctaccattgtaactttaatttgagtataaaaaagaataaggacaatgaaaacatatttttgtctttccttccttacttctctcttttttaccaaatgaaggaaataaatatatgagaatgacatatacattcacacatacacacaaaggcacatttatacatatatatttgtctacttacaaacccacaaagaagcacacaaacacaaatttacatatgactaaagtcaatttaattagctccaaaggaatgttaatgtagaaaggagtgaggaagaaaagtcacctagattgaggagatatttctaccagagggacttatgtcttctctgctccttccttcactcagtactatgtatgtgagaatcatagaaataaaggtgtcagcattttgcttatactttttactgttactattgttattttatggttttctttttcttttttctttaaacatttgtttatctgggaaacattctaattttcttgattatatcttccctaatggattcagtgacctagtccagggtcctcaatgatgtccaggagagttttaccagtagcagacctgagacatagattccagtgaaagttacaaattaaggaagtataccctgaagaaagcattaaatgtatcaaaaaaacaaaatggaaaatagtaagaacaagctagagtgggaattttctaggaaggatcgcacattcactctgatcttgctggacgatctagagtccaaattatacccaattgtctctccttgagtcaaaggagttggatagggccaaatctctaatagtcataggtgccacctctgagcagcaaaacgaacaagacctgggggatgagtacagagagttggtaaagagatctgaattagctgggtgtgatggcacgtgcctgtaatcccagcttgggaggctgaggcaggagaatcgcttgaatctgggaggtggaggtggtggtgagccgagattgcgcccctgcaccccagcctgggcaacagagagagactccatctcaaaaaaaaagagatctgaagggggatttgagtgacttacagtagtgtcagcgccagggcctgatataactgatatactctttgtacctatcaagtggtcccatttataaataaagggggaaaaactttttgggatagttgcaaaataaacattctagataatcaaatgtcccggttagttattaatatttcaaaggtcttaaaataaactgacactataaaatactgggaagtgccactgcactattatatttaatattattataatgttgttgctataaatagtgcaagaaaatagttttcttatatttaaaactgaaaaatcagatgaatcttaactgtatcagcataacccagcaaaagacgggcacagtggcaagcacctgtagtcccagctactctggaggctgaggtgggatgattgggtgagcccagaagtttgagaccagcttgggcaacatagcaagactccatctcaaaaaaacaaaaacaaaaacaaaaacacaatacacaaaattatattggcatatgttttgggtcctttactaataagtatgacaatatgatatcagaggaataccactccacattgtgtgatttttctaggttaaaaagtagaatgtagtaacagagttacttattgacatcaagatgtcagtgaacacaaggagaaaaaaagtttaagcaatggtctcatctgacagtcatgaaaatagcataatgggtaaaagttaggaagtggtgttagatctggtggttccaaatcttgtgctgccacttactagctagctgtgtgaccctagacaagctaattcacctctagatgcttcagtcttgtcatctctaattttgggataaactctaactcctaaatatagttgttatgaatattaaataatttaatataggtatagtgatcagaaaagagtctatcagataggacaatttttagctgttattatttttactattataagaaacattgctaggcaaaaaactaaaattcaaaatgatttattctcatagcaaaagtcagcaaacttttcctctaaaaggccaaaccataaataaatgttgattttgctggccatatgcgctttgtcacaattattcgactttgctcttgtagcttctaaacactcaaaaataatatataaaagaatgggcgtagctgtgtctctaaaacaagcatcatatccaaacacaagcagcaggctggaatcagcccatgagttgcagttccttgaatcctgtcataaagtaacaactaaaaattctttttttttaaccaaaaataaaattaaagagattctgtctcattttataaatatcataaatattttatgaatataccaaagacaatctacttgatgaatgtccacctgaacaatttattaattgtattcaagggaaatcaatttgagatttgactcaggagagaaaatgaattgcaaaactcaaagagaacatactggccctggttcaggaacagcaaagatataaaatatctgggacaccaaacactgaatatttttattaagatggtacatggcccataggcaacatgccaagagaagccaacaataaaataatcttttcccaattacaagattgaattgacattacactacttggtttaattgaaagtccaatacaatgaggagtgttatcttcttggatgttattattgcaatagataaacgacctaatctcaaagatttctaaaatagcagaggataaaactttaaacagcctaaagatgttaaaagaaaaagttaaaaaaaaaaaaaaccaacgctatgtcagactttatatagagtatatttgctacatgtacatttgctacatgtatcatttgaaacaccaaacagaaataagactttttaaagactttttttctgaaatgatttaaaatctgtctacttttgcttacaactatacttatatagtttatttttcacagcactcattaaactgacaaaaatgcatacgcacatgcatgtatacacttacagatgaccaaagagattaagtacaactggatatatatatatatatgatacatgcaatgaaatctgaaggacacaaatgtagctctaataacaattttatccttcattcactatggaatattaagtgttttatccaaaagtgacaaacgaaaaggtctttaaaaattgtttttattatttagttgctgttgttgttgttattgcttttgaggcgaagttttactcttgttgcccaggctggagtgcagtggcacgatctcggctcactgcaatctctgcctcctgggttcaagcgattctcctgcctcagcctcctgagggattgcaagcgtccgccaccatgcctggctaattttttgtatttttaatagagactgggtttcactgttttggccaggctggtctcgaattcctgacctcaggtgatccacccacctcggcctcccaaactgctggaattataggcgtgagccaccgcgcccggcctattatttgtttttatattctgaacattttttatttatcaaaataagcactttaattagaataattttatatgattagttactatgttggtggttgtatttttttgttataatttttcattttgctcttcctgcttcttttttcattggtaacaccatctattttcacccattttatgtcctaataagaaaggtaaatgaaatattataagcagtttttgtatttaacgtaaaataatgcatctgtaattttgtagaattcagtccacatttattgtaataactgatatatgatttatttttcaatttttttctgtttttttttcatttttctttttccaattattttctggaagcatcagggtgctattaaatctcttttcttctttttttatgcatatttatggagattttctttaattattaatctgttaaagtttacttttcctttcctggtattcatattcaaatctattttctcaactattatgtgaagacaaggtaattatttccccctccaaggcactctcttcttccaatgatttctttaaaataatttcacttccacacatctctcccaccctcacgagattatgcctcttctcagtctttaatattaggtcacattgtaataattaatattttgagtccttgtttattacaaagatttactttgaaacgcgtctcttgttgcatctttttaaaggattcatgctaatttttggaagtctgttattttgtatatagatctattacacatatacagcaaggcctgtgctcattgttttcttccctcttaatttttcctgttttgaatctgcagttccgattcacttaccatttactatggcttttttcttaagcattccctaattcggaggctgcaagtaatccttgtggaagtctttattttattttattttatttattttattttattttattttattttattttattttatattttattttattttattttattattttattttattttattttattttattttattttattttattttatattttattttattttataattttgagacggagtcccactctgtagtccagattggagcgcaatgtcgcaatctcggctcactgcaacctctgactcccgggttccagtcactctcctgcctcagcctcccgagtatctgggataacaggcgcccgccatcacgcccagctaatttttgtatttttagtagaaatggggtttcgccatcttggccaggctggtctggagcttctgacctcaggtgatctgcctgccacggcctcccaaagtgctagagattattacaggcatgagccaccgtgcccggcctgtttctcttactttaaagatgactaatttattagtttttaagagattcttgagttgtactcctttgcatgtaaactattaatattattttagcatattctggctttcaaatatgcaattgaatatttaatgtaaatctgagtacatctttattattcccattccttgtttttctatatgaacgctttacgtgttttctctttatctttgcagtttgggaatttaccagggcttgctttttctgttacttgttgggttttgtccagtttaaggagctttctttccccctggcccttacacttcctgcgtattaaggattatagtcatgttactgaacacccttattgttttcctcctgatttcaatttcttctaagctttgtttcttgagggtttttttgaaaatttttcgcatataatctattttaaaataaactttcttttttagataactgtaaatccacatgaagttgtaagaaatcatgcagagatctcgggtacttttcctccaatggtaaaaacattttacacgttatagtattatatcccaaccaggatagtaatattaataaattacgctgattttatttggatttcctggttttgcatgtatttatatgcatatgtatgttcgtgtgtgtgtgtgtgcatttgtgcatatttagtttagtggaaattctatcatatgcataggtttgtatatccaagaccacagtcactatccctccttcaatgtacaacttacccagcttctcttcagccttgacaacatctggttttgttgctatattttctgttctccattctacaaaacgtgtagtgatctttcattgtggctttagtctgaatttctttaaaggctaatgaacatttttcaagagtttatttaccacctgtatgtatgctttggtgagaggtctgttcatgtcttgtgtctattttctaattgaattgcatggttttttcattgttttgtttttattttatattgttgagtttttagagtaacttacatattctagatactaacttttaggtgcatacattgtttgaaaatattttttctcaggctgtagcatatctttccatcctcttcacatggttttcacagtttcacagtggagatttttgttttggtttggtttttgatgggatctaatttagcattcttttctttttttggattatgctttaagatcaaatcagaaaaaatctttgcctcacccagactctgaagattttctcctatgttttctttctaaaatgtttgttttactattaggtctgtgatggattttgagtaaattttttttattaggtgttgggctcatattggggttattttttttaaagtatggtgatttatctggaccatttgttgaaaagtctatctcttctaattaaattgcatttaaactattttcaaaaattagttgggcatatgtgtgtgagtctatttctgagttctccattctgtttcattgatctccatgcctgttcttctgctgataccacagcgttttgagtcctatagatacacagtaagccttactagcagatacagtaatctatcctacttcattcttcttcctcaggattgttttaggatctcttgggcctgcacccttccatataaattttaaaataaggttgtctatgtctacaaaaaaagggataacaactgcattccatctatagattaatttggaaaaaccgatatcctcacaaaagataaacatagaatgcctctgcattcacttaggtctttatttatttactcagctttttataattttcggtatacaatttcgtatgtattttgctaagtacaaaagtaagaatttcattttctcttttttttttctgatccttctagtcagtggatggatttcggtttctttgaagcaattttaaatggttttgagttctaattttggttttccatatgtttactgtaaatgtatcatcagaatgtgatttgttttctgaattgcttttgtattctcctaccttactgaactcagttcttagctttaataagtttttggtagatttttctttcatgttccacatagataatcaggttatatgcaaattgtttgtttggttcttattttcctattgtcatgctttaattcttgccttattgcaagggctagagcttctatactatatttaataacaatgatgagaatggacacccttgatcttactggtcaagcaatcaggctttccccattaggtgtaatattagctgtgggtgttaataggtgctttttgtcaagctgagacaattctcctctatgcctaatttgctaagaatttttgtcatgaataaagcatcaatttttcatacacttttatacatcagtggtatgattatattactttttttgcatccttaatattgcagattacattgctttatttgagaatgatgaaccaaccgatcttgcaaacatagaagaaatcaaatttgggctgggtgtggtggctcacgcctgtaatcccagcactttgggaggctgaggcagatggatcatgaggtcaggagttcgaaacgagcctggccagcatggtgaaacctcatctctactaaaaatacaaaaattagccgggcgtggtagcgcatacctgtagtcccagctactagggaggctgaggcaggagaatcgcttgaacccgggaggcggaggttgcagtgagccaagatcacgccactgcacaccagcctgggcgacagggcaagactcggtctcaaaaaaaaaaaaaaaaaggaagaagtcaaatttagtcaggattaatatatttgaatacaattctagaatttacttgccagaattttggtgaggatctttgtgtcaagtttttaagtaatactagtctgcattttttttttgtattttccttggtttttgtgtaagggtaaaataattttatgaaatggctatgtaaaatttgtgttaattttcctttacatgtctagtagaattctctagtgaaacaatctgttcctaaagatttcttttgattatctttttaattgcaaatttaattttttaatggttataaaattatttcgcttttctgtttaatcgtggttggattttggtagttcatggcttctgaagaattagtgcctttcttctagtttgtcaaatttatgagcacaaagttgcatgtagcgctatcttattattatttcgatgtctgcaggatctgtagtaacatctcctatttcatctctttcatttctgacattggtgatttgtgtcttctttttatttatatcagtattgctagtggtgtgttaattttatttattttccaaaaaacagatttttatttcattggattttgagacaccttgatatttctcaacagtaattaagtcagatataattacatatttgtgaaccattgttattgccattgatataacttatgtaaaacttacaggtatataaagacacataaaggaaaggcaaaagcactgatgattgagcccatttcaaagtctgtcagaaatttttcctatagtttatttcagaagctaatattcttccctttctcaatacttgtgatggacaattcctcttttttgtctgttccatgttgacagcaactagatgcagtatgtatttgtttgttctcacactgataacaaagacatacccgagactgggtaattttaaaggaaaggaatttaattgactcacagttcagcatggctgtggaggcccaggaaacttacaatcatagcagaagggaacgcaaacatggtagcagcaaggaggaatgcaaagcaaaagagggaaaaaccccttattaaaccatctgatctcatgagaactcactctcataagaaaagaagcatggggataaccaccttcatgattcaattacctcttatcaggtctctctcatgacacgtgggtattatgggaactacaagatgagatttgggtggggacacagccaaaccatatcatagtgcatcttcggtatttccattcctggaagtgggagtgtaaactctgcctgtggaagcataagggttcagtgatcatatttaacatcttgatgaaactgcagaaggaagacacaatagctcatcatggccataatctttaggattaaggacaagaaagatttagccaggctagttaagtgcttatcgaatttttgcttaaaaaagtggactagctactctcttatgggatcttatcctaaaagataaaattctgtaatggattctagcatattagaattctagtagaatctgatatctcacttgaaccccaaaatttacctgttgcaacttttgcttatttgtaaagaagtaggtatatgtgttagatttgggaaaaaaaaggaaccctgcctgtattaatccattctcatgctgccattaaagatacacccaagtctgggtaatttctaaagaaaagaggtttaattgactcacagttcaacatggctggaggggcctcaggaaacttacaatcatggcagaaggggaagcaaatatgtccttttccacatggtggcaggaagaagtgtcaagcaaagggtgaaatgctccatgtaaaaccaccagatctcatgagaactcactcactatcatgagaacagcatggttataaccacccagtaatttaattatctcccactaagtgccttccatgacacttaaggattatgggaactacaattctagatgagatttagggggagacatagccaaaccacgtcactgcccaactcaagctaccatcttcccatgtgttctgtctggtaatagtgattacaacagagatgatcctgaattcaatgggctttatgctccccatggtcatgctattttgaatgctagtatagttttcaaaacagatgaaattagataaattaagcaccagaaaataaattttcttatattattatactttaagttctagggtacatgtgcacaacatgcagatttgttacatatgtacccatgtgccatgttggtgtgctgcacctattaacttgtcatttacattaggtataactcctaattctatccctcccccctcccccaacagcacaacaggccctggtttgtgatgttccccttcctgtgtccaagtgttctcattgtttaattcccacctatgagtgagaacatgcagtgtttggttttctgtccctgcgatagtttgctgagaatgatggtttccagtttcatccatgtccttacaagggacatgaactcatccttttttatggctgcatagtattccatggtgtatatgaggcactagaaaaattcttggacaaaattttataatgtaacttccataaatggtatagagtttaggtaactagttctttaggcacacaggctgtttatgatatggtagttaaaataatttgcataacattgactattttctatgacttctgattaaaataaaataggtgaagtaagactattttcatgacaagtgggaaaagcaaacatgcttcattgacatttcattaacataatgattgttctcactcattcattagtttgtaattcgaagtataaaatagcaaatactctctaagcataaaatgatggctgtgtcatcaagcatagagaaacaataagtttattgcctctaagttaaaaaagcatattgtttatgtttttagaaatagaattcaaaatatttaaggtctgtagtcttagaggatttaagactctcacatgatatttaaagaaaggaaatacaatctcatttaagaaaaaataccttcaacattttgaggcatgtgattcagaaaacaataccaagtctttctttagtactcccatattagagttgggcatttgaaaaatgtatccatctatccactgtatcattgattttagaggtgatttgtcactctgcaaggggtcttctcttgagtttgacagcttttgatgaaaatctgaaattagagaagaattacctgagcagagacagatgagccaaatgacatgaggcactgaagataagtaccccagtcttgttctcagattgatgatttatttatcagaatgcactggggaaagtaaagtttatcacaagtgattgaggaaacaagcaaaaaagataaaagacaataaataaatagtgtaaattgaacacgttactcctgaaatgtccactaatacttaaacaagatggagaagaagaacaacattatgaacacacatacaatcacacacacacacataacaacaacaacagcacattataagccattctaatgagaacaaaacagaatatttaagtgtttggtgaaattgtagggtagacaataggtgaagtgacatgaaatttgttaatgagaaaatagcttattctgctagcaacaaaatagggagcatcctctacagcacaaattattctcatcaaattttagtaacttttaagtttaagttatggaaattatagatcaaaaccaatagaaactacatagtcgatattttacttcatttgggctgctataaccaaataccataagctgtctggattataaacaacagaaatgtatttttcacagttcaggtgactggtaagtccaagattaaggtgccagcacatttggtatctagtgagtgtatgcttcctaataaatagctgtcttctcactgtgtcctcacatggtgaagggagcaaagaagcactctgggatctttggtgttgaattttattgaaaactttttctgcatctattgagatgatcatatggtttatgttttttaacactgtttacatagtaaatcatatttattgattttatgtgtgtgtgcatgatgaatcaaccttgcattccaggaataaagcctgcttgattgtggtgaattaactttttgatgtgctgctgaattcagtttgctagtattttgttgagaaataataaccattctgagatgtggagagatggtatctcattgtgattttaagcattagtgatacgagcttttttttgtatatttgttggccacttgtatgaattcttttgagaaatatctgttcatgtcctttgcatactttttaatggcgttgttttttgcttattgagctgtttacatttcttatagattttgagcattagaccttgtattagtcagttttcatgctgctgataaagacgtaactgagactgggaagaaagacaggtttaaatgcacttacagttccatgtggctggggagacctcagaatcatggtgggaggcaaaaggcacttcttacatggtggcagcaagagaaaatgagggagaagcaaaagcagtaaccctgatgaacccatcatatcttgtgagacttattcactatcatgagagtagcatgggaaagaccagcccctatgactcaagtgcctccccctgggtccctcccacaatatgtgggaattctgggagataaaattcaagttgagatttgggtggggacacagccaaaccatatcattctgcccctggcccctccaaatctcaagtcctcacatttcaaaaccaatcatgcctcccccactgtcccccaaagtcttaactcatttcagcattaacccaaaagtccacagtccagagtctcatctgaaacaaggtaagtcccttctacctatgagcccgtaaaatcaaaaacaaagctagttactttctatatacaatgcgggtacaggtgttgggtaaatgcagcagttccaaatgggagaaattggccaaaacaaaagggttacttatgaaaatttctgcagctgccttgaatttctccccagaatatggatttttcttttctatcacatattcaggctgcatattttccaaactcttatgctctgcttctcctataaaactaaatgcctttaacagtacccgagatacctcttgaatgctttgctgcttagaaatttcttctgccagatactctaaatcatctttctcaagttcaaagttcaacaaatctctagagcagggacaaaatgccaccagtctctttgctaaaacataacaagagtcacctttactccagtttccaagaagttcttcatctccatctgagtccgcctcagcctggaccttactgtccatatcgctatcagcatttttggcagaaccactcaacaagtctctaggaagttccaaattttcccatattttcctgtcatcttctgagccctccaaactgttccaacctctgcctgttacccagttccaaagttgcttccacatttttgggtatcttttcagcaatgacccactctactggtaccaatctactgtattagtccattttcacactgctgataaacacatacctgggagtgggaagaaaaagaggtttaattggacttacagttccacatggctggggaaacctcagaatcacagcaggaggcgaaacgcactactagcatggtggcagcaagagaaaatgaggaagaagcaaaagcagaaatccctgataaacccatcagatttcgtgagacttattcactatcacaagagtagcacagaaaagtctggaaaaactggccaccatgatttaattacctccccctgggttcctttcacaacatgtgggaactctgggagatacaattcaagttgagatttgggtggcgacacagtcaatccatatcagacttttgttagatatgtagtttgtgaatcttttctcccattctgtaggttgtctgtttgttgatagtttcttttgctggtcaaaaactccagttttattagatcccgcttgtcaaattttgttttggctgcaattgcttttaaggacttagccataaattatttgcaaaggccaatgtccagaagggtatttcttaagttttcttttaggattttgattgctttgggtcttacatttaagtcttgaatccatcatgcattaatttttaaatatagtgatagatgtgggtctaatttcattctgcatgtgactagccagttattccagccctacttactgaatagaaagtcttttccacattgcttatttttgtcaactttgtcaaagatgagatggctgtaggcatgtgggtttatttcagggtactctattctcttcctttggtctacatttctgttgttgcatcaggaccttgctgtttgggttattgtggccttgtagcatagtttgaagttgggtaatatgatgcctccaggtaggttatatttgcttagaattattttgactatttggactctttttcaattccatatgaattttagaatagctttttccaattctgtgaaaaatgatagtagtagtttgatgagaaaaacattaaatctctacattcctttgggcagtatggccattttaacaatattggttcttccaatccatgaggatggaatatttttccatttctttgtgtcatctctgattccttttagaagtgttttgtagatctcttcgtagagatatttcaggtctttggttaggttttctttttctgtataactatagtaaataatattaagttcttgatttggctctaagcttgaacattatttgtgtatagaaatgctactgatttttaacattgattctgtatcctgacacttcactgaagttacttgtcagttcagatagtcttttaacagagtcttcagggtgttctgagtatagaatcatatcatcagtgaagtgagataatttgacttctttttcattttgatgcctttttatcttgcttgattgctcttgctagaaattccagtactatgttgaataaaagtggcgagagtgggcatccttatcttgttccagttcttaatgggaatgctttcagattttgcccattcagtatgatgttggctggtcattttatcatacagctcttattagtttgaggtatgttccttcaatgcctaatttgttgaggttttttattatgaagagatgttgaacttcactgaaaactttttctgcatctattgagaagattatatggtttttgttttttaacactgtttatgtggtgtctgtgtgtgtgtgtgtgtgtgtgtgtgtgtgtgaatgttgaaccaaccttgaatcccaggaataaaaccttgattgtggtgaattgaatgttgatgtgctgctgcattcagcttgctagtattttgttgagaaattttcatcagaaatattagcctgtcgttttctttttttgttgtgtctttgccaggttttggtatcaggctgatgcttgctttgtagaatgaattaggtaggagtccctgtattcgtccgttttcatgattctaataaagacatacctgagactgggaagaaaaaggggtttaaatggatttctacttccacatggctggggaggcctcagaatcatggcgggaggtgaaaagcacttcttacatagcaccagcgagagaaaatgaggaagaagcaaaagcagaacccccgataaacccatcagatcttgtgagacttattcactataacgagaatagcatggaaaagaccagccaccatgattcaactgcctccccctgggtccctcccacaatgtgtgggaattctgggagatacatttcaagttgagatttgtatagggacacagccaaccatgtcattctgcccatggcctctcaaaatctcgtgtcctcacatttcaaaaccaatcatgctttcccaacagtctcccaaagttttaactctcttgagcattaactcaaaagtccacagtccaaagtctcatctgagacaaggcaagtcccttctgcctatgagcctgtaaaatcaaaagcaagttagttactttctaaattcaatgagggtacatgcattgggtaaatacagccattctaaataggagaaattggccaagatgaaggggctactggccccatgcaagtctgaaatccagcagggctgtcaaatcttaaaactccaaaatgatctcctttgacttcatgtctcgcatctgggtcatgctgatggaagaggtgggttcccatggtcttggagacctatacccccgtggctttgcagggtacagcctccctcccagttgctttcatgggctggcattgagtgtttgcagcttttccaggctcaccgtgcaagctgttagttgatctaccattctggggtctggaagatggtggccctgttttcacagctccactactcagtgccccagtagggactcagtgtgggggctctgacctcacaatccccttccccactgccctaacagaggttctccatgaagacctcacccctgcagcaaatttttgcctgggcttccaggtgtttctatacatcctctgaaatctaggtggtacccagacctcaattcttgacttctgtgcatacacaggctcaacgccacatggaagctgccaaggcttggggcttccaccctctggaggcacatcccaagatgtatgttggcccctttcagccatggatggagtgactaggacaccgggcaccaagtccctaggctgcacacagcacagggacacgggacccagcccactaacccactttttcctcctgagcttccaggcctgtgatgggaggggctgctgtgaaggtctctatcatggcctggagacattttctctatgatcttggagattgacattaggctccttgcttcttatgcaaatttctgcagctggcttgaatttctccccagaaaatgcatttttcttttctatcacagcatcaggttgcaaattttccagacttttatgttctgcttcccttataaaactgaatgccttgctgcttagaaatttcttctgttggatatgctaaatcatctctctcaatttcaaagctccacagatctctagatctggggcaaaatgccaccagtctctttgctaaaacataataagaatcacctttgctccagttctcaggaagttcctcatctccatctgaggctacctcagcctggaccttattgttcagatcactatcagcatttttgtcaaagccagtcaacaagtctctaggacgttccaaactttcccacattttcttctcttcttctgagccctccaaactgttccaacaatagcccattgcccagttccaaagtcgcttccaaattttcaggtatcttttcagcaacaccccactcctggtaccaatttactgtattagtccgttttcatgctgctgataaagatatacccaagactgagaagaaaaagttgttcaattggacttacagttccacatggctggggagacctcagaatcatggcaggagaaaattaggaagaagcaaaagtggaaacccctgataaacctatgacatctcatgagacttattcagtatcacaagactagcatgagaaagactggcccctatgattcaattacttccacctgggtcctccccacaacacgttggaattctgggagatacaattcaggttgacatttgggtggggacacagccaaaccatatcagtctctcctccttgattttgaagagtagtttcaataggattgtgaccagctattttttatttgctcatagaatttggctgtgactgcatttggtccaggaggttttttttttttttatgtttttgcgtaatgggttttttattactgattcaattttagaactctttattgcctttttgtttattcaggatttcaatttcttcttgatacgatcttgggcagtcgtgtttttctacgaatttatttattttctctagattttctagtttgtgtgcatagtggtgttcataatagtctctgaggatcttttgaatttctgtggcattggttgtaatatcacttttgtcattcctgatcatgtttatttggatttattttttcattgttcatctagctagtagcttattaatcttgtttattctttcaaaaatcaaacttttggtttcgttgatcctttgtataatttttgattctcaatttcattcagttctactctaagttatttattttcttctcctagttttagagttacatttttcttgtttttctagaagtctaggtgcaatcttagatagctaatttgagatttttctatcttattgacataagcatttagcactataacatttccttttaacactgcttttgctacatcccatagattttggtatgttgtgtgatataatttggctctatgtcccaacccaaatctcatctcgaattgtaatcaccatgtgtcagcaaaggagtctggtgggaggtgattgaaacgtggagacagacttccctcttgctgttctcatgatagtgagttctcatgataccttgttttttgaaagtgtagtacttgcttcaaattctcacctgctctgccatggtaagatgtgcttgcttccccttcaccttccatcatgattgtaagtttcctgaggcctcccagtcatgcttcctgttaagcctgtggagctgtgagtaaattaaactttttttcttcataaattacccagtctcagatagttctttaaagcagggtgaagatgagctaatacacttttatttctgagaatttttttatttctgccataattttgttgtttactcaaaagttgttcaggagtaagttgttcaatttccatgtgattgtgtggtttttagagagcttcttaatatttatttgtacttttatttctctgtagtctgagagtatgcttggtatagagtttgattttttgtttaacttattgaaactttatggccaagcatgtggtcaatcttagagtatgttccaggtgcaaatgagaagaatatacgttctgtggttgttgggtggagtattctgtcgttgtgtattaggtccaattggtcaagttataatagacatttagagtttctgtgttagtgttctgcctcagtgatttgtttaacactgtaagtaggtagttgaaatccccccactattattgtgggacaatgtcttttcataggtctagaaatacttgttttatgaatctaggtgctccaatgttgggtgcatatatatttaggatagctgggtcttttagttgaattaaaccatttatcattatgtatgtccttctttgtcctgttatactgtttttggtttaaagtctgttttatctgatataataatagtgacccttgctcttttgtgttttccatttgcatcataaatcttcctctaaccctttattttgagcctgtagatgttgttacatgtcagatggtcttttgaagacagcagacaattgaatcttgttgttgttgttttaacccaatttgctattctgtgccttttaagtgaggaatttagaccactcacactcaaggttaatattgatgtgtgaggttttgatcctgttgtgatgtttttagcttgttgctctgtggtcttaattctatagttgttttataaattattttggctatgtacttaagtgtgtttttgtggtagcaggtattgctctttcatttctgtgtttagaactctcataatgatctcttataaggctagtctagtggtagcaaattcccttagtgattgcttgttgggaaaacattttatttctctttcacatatgaaagttagtttggtaggttatgaaattattggctggactttcctttctttaagaatgttgaggccattcatagtggcttacatctgtaatcctaacactttgggaggctgaggtgagagggtctctcaaggccgggagtttaggaccaaccttggtaatatggtcagaccctatctctccacaaaattttaaaaattagccatgcctggtggtactcatctatgaccctagcaggaggctgaggtgggaggattgctttagactaagaagtcaaggctgcattgagccatgatgtgccactgcactccagcctaggtgacagagcaagatcctgtctgtaaaataaaatatagagtgctgaaaatagacctgcactcttttctagcctttaaagtttctgctgagaagtctgctgttagcctgatggacttctttttgaaagtgatctgacccttttccatagctgcctttaagatcttttctttgcactgaccttgggcagtctagtgactatgtgccttggtgatgttcatcttctataatatcttacagatgttctctggattgtttgtatctgaatatccaactctagcaagattaagaaaattttcttgcattattctctcaaatgttttttaggtggattactttttctcctctttcagaaatgccaataatttgtaggttttgttgtttaacataatcccatattactcaaagattttgttcattttttaaaattcttttctctttaattttgtctgactaggctagttcaaaagagaaatcttcaagctccgatattcttttcttcttcttggttttgtctattgatagagctttcatttgtattttgaaatttcttaagggactttttcaatttcagaagctctgttgattttttaaaaagttgtttatctcctccttgatttcctaggtttctttagtagtttctttgtgttgatttttaaatctatcttggattttattcagcttccttgcaattaatgtttttaattctttatctgtcatttctgagttcctattttggttaggttccattgctagagtactagtgtgatttttttggtggtgtcataagattcagatttttcatgatggcagaattcttatgctggtttcctctcatctggagagtctggcacttctaacttttataattattttcatgcagatatgatttccttttctttctctgtatgtattttttctttacctttaccaccactctctaggaggtgtgactgtggagtatgttgcgtaggattctttggctttgctgctacagccatgtccacttctgtccacaggtttcatactgggctgtgggattccacctataggctagtggatggcacttactcacaagagctagttgcggcacaagcagacgaatccatacctgatctttgcttactgtgaggttctctccgttgtctcaggtgttgggctggacagtggggtggccagtgccctgagctcctgttccttggcaataggggaacacctctggcctgagctggggccccaggcttgcccatgaacataccaatggagagcacaggcaccagtcctgacaagggtggctgggaagagctcctggtgaaatgcactgaggtctctgccagagcatgaagtcattgcactggctccccatcttagataggaagtagcataatctattttcctgtcacaccccagttccatgtgactcctcattcagatgcacattgtagtctacctctggaccccagtatggatgagagccatagaaaacgctgctgtgtgactgtccatcggagaggttttagggcagaaccttgtcagtcagtctaatgcaggcacctttatagctctcttgttctctgatgtggaaggctgctgcttcatgtaaaagggaaggaggcaggtgtcggttgtggtgtcagctggttgggtcagtctgacctcaggctctgttggaagtggtcaggtgccagaagagttggaatagggtaggtggttttccagtctccaggcccctcgattgcccactggacagtgtgtatgattcctgaaggggctggaccaggtttgggtgctggctgagatggggaggggcaggcttgtccctgagtcacaagctgaaatctcaggcaggcaggcagaaagcttatgtggtaggagcctaaaagaaggtcacagacctatagggtagggttttcaggagggcttagctgacttcagctgaaatgctcaggttggggcagggtgttggaggtgtgagaaagccttcagcttctctgttccctccctagcctgagggcagtggtggcaggggccttccacagtcacagctgcactgccccaaagtgttcaggcaggggtggggcgggtgcactgggagtccaagccagtgggccctgcctggtgaggagcagcaaggtcaggggtcacactgtctgcggtccgtctgctcctcagcacccagctgtagcctctgacctacaggtgtgtgaaagaatttgtcctctcttgttggtgggtatacggcagctagtactgggctgctcagggatccagggcctgtggggcttcatgtgggcttgagcggtaactctgcacagactccaggtggttctttgtgtcactctggaggcctgggagtgtcaggggtgttctcctgagcccagtgtagcaaacgtttgtggcagaattgtgggccccaaggactttcacggactcacccattccccatgttacagagcttcccctggctccacaccagtcccaggagggaggctgcctggcttcattgtgctctattctccgtaactcctgtcactttcttggtgaataccaacgtgatcgcctagaaaatccactttaaaagctagcatttattcaccactttgcttcctctctgtgagagcctgatgcactagctgcttctagtcagccatcttgaaccagaacctctgcttttgtttgtttttgttttgttttgttttgtttttcagccatcatgaggaattgtctcaaatttattgctaaaataaaggggaactatccatccattggtcatatttagtattaggaatattacttacagtatgatttcaagggagctcctagaaagtaatagttcctttaaatattttttgtaatgtcattttattttattactctttctagaatattgttgaaaactaatattgttagcactttggttgtttctgtaattttttattttcaacctcaagtttcacttaaaaaagcctcggtctgctgacttttaactggtaatgttagaggtacatttttagacacagcaaagtatttgcccattccaagttagatggtaccaaatggagggactgtccaattctgaacactagaatatatacttatctctatgctaccttcactccctttccctccatgaagtcccagagatttatgatgtagttgtatgatttcatctgtaattattttaaatggcatttacctgatttcagagatttgaattcagttagagacaataatcctgttttactactctccttaacttcatcacatttcattttttctgttaactgtatttattttaccatttttaattttaacataatattttgaattaaaaagctgtaaatcaaacatagtcaaataatgttctatatctgtcctttattaaaaatacaactgacaccacagcagtacatttttcaggctttcgatgaggccaaaccagctgctttcctttgtccttcactttcctcagaagttttctttaattctgggctttaaccttcctgactacacatattctctgcttctctttcaaattgttataccctcctctaagtcaatcttcaatttataacattgtgcccttcatggttagatcagtttaaagatccaagtgaaacatgtaaagtgttcaatttgaatacataaaacaatgcagcagtagttaaaatcacatgtaccatataaaaactatcagccttaaagtatcaccccattaggaaagaccaattaaaaagtatggctctttcactcttccctgacggtcagtagagcaaagatttgacagattgaaaatttggtctgaattacttatattgaatatttcttaaagaactctggttcttttcatcacactacaacattcaaactgatttttaaactattatttaaatttttataattatatagtcatatactaatcaaaaatccagaaaggaatctacactttgtattagtccattctcatgctgttataaagaactgcccaagactgggtaatctacaaaggtaagaggattaattgactgacagttccacattgctgggaaggcctcaggaaacttacaatcatagtggaaggcaaaagagaagcaggtaccttcttcacaggtggcaggatggagtgagtgcaagtaggggaaatgccagatgcttgtaaatccatcagatcttgtgagactccctcactatcacaagaactgcttggggtaaactgtttccatgatctgagttccaccacctggtcttgcccttaacatgtagggattatggggatcataattcaagatgagattttgggtggggacacagccaaaccatgtaagtctgtacctggccccttccaaatctcatgtcctcacatttcaaaacacaatcatgcccttccaacactttctcaaagtcttacctcattccaacattaacccaaatgtatgagtccaatgtcttttttgagacaagacaattccttttgactgtcaacctgtaaaatcaaaagcaaattagttactttctagataagatgtggttacacaccttgggtgtgtaaatgtaaccattccaaacagaagaaattggccaaaacaaaggggctgcaggccccatacacgtccaaaatccaatagggcagtcattaaaccttaaagttccaaaataatatcttttgactacatgtctcacgtccaggttatgctgatgcaagaggtgggctcccgcagctttgggcagctctgccctgtggtttagcagggtacagtccccccccggctgttttcatgggctggcatttagtgcctgtggctcttccaggtgctcagcgcaagccattggtggatctaccattctggggtctggaggatggtggccctcttctcatagctcccctagaccgcagtggggactctgtgtggaggctctgactccagatttctcttccacactgccctggcagaggttctccatggggcctctgcccctgcagcaaacttctacctggacacccaggcatttccataggtcctcttaaatctaggcagaggttctcaaacctcaattcttgactcctctgcacctgcaggctcaacaccatgtggaagctgccaaggcttgaggcttgcaacctctgaagcaacagcccaagctgtatgttgtccccttttagccacggatggagctgaagcagctgggatgcagggcaccatgtctggaggctgcatacagcaggggggccctgagccaggcccacgaaaccatttgtatctcctaggcctctgggcttgtggtgggaggggctcccatgaaggtctttgacatgcattggagacatttttcccactgtcttggtgattaacatttggtttcttgttacacatgcaaatttttgtggctggcttgaatttctcccccagaaaatagggttttcttttctgtcatattatcaggctgcaaattttctaagtttttatgctctgtttcctcttgaacgctttgctgcttaacattttcttttgccagataccataaatcatctctgtcaagttcaaagttccacaactctctagggcaggggcaaaatgctgccagactctttgctaaagcatagcaagaatcatctttgctccagttcccaacaagttccttatttctatctgagaccacttcagcccggacttcattgcccatatcactatcagcattttactcaaaacctttcaagtctctaggaagttccaaacttttccacatcttcctatcttcttctgagccctccaagctgttccgacttctgtctgttacctagttccaaagtaacttccccattttttgggtatttttacagcagagccccactacctcactactaatttactgtattagtccattctcacactgctatagagaactgtccgagactgggtaatttataaaggaaaggtgtttaattgactcactgctttgcatggctggggagccctcaggaaacttacaatcatggtgaaaggcaaaggagaagcaggcactttcttcacagggtggcaggatggagtgagtgcaagcagaggaaactgccagacacttataaaaccgtcagatctggtgaaactcactcactatcaagagaacagcatgggagaaactgccctcatgctctaattacctccacctggtcctgcccttgatacatggggattattgggattatatttcaaaatgagattttgggtggggacacagccaaactatatcatgcttctctgtgaatgtatctttggaattcttagatttgcagcagcagctcttcccaggccatagctttctcttctcattgtcgcaaatcccaccatcaattttccaaagcgaatagatattctccttccaggctagactctgtcaggctgtcatgactgctttcagaaacaactgtgcttctggttttgaaagcagacttttctgtgtttgatggaggatgtttatatcatgaaggttaacttatagggactgcagaatcatcacacagcataatggaaggaaaagtaactggatgaaggctgaattacaatctataaataagggtagctgctgctattctatttagacggcagcaagaaaaggtaggacaaaaaaaaaaaaagcaatgaaggaaaaatagatgaagtaggaattaaaatttaactttttgccaaatggaattcttaaggagaatgaagcaaagatgattaaaaccttaatgtttccaaatctctcagttttgcctaaatcccatttcttacataggctctagatgctagcataggtgtccaatcttttggcttccctgggccacattggaagaagaactgtgttgggccacacattaaatacactaacactaacgaccgctaatgacctaaaaaaaatgaccaaaaaaaccgcataaagttttaagaaagtttatgaatttgtgttgggccacattcaaagccaccctgggccacatgtggtccatgggcaatggggttggacaagcttgatctagacttgagaatggtattgactatcagcaaagttcaaacgatatgaatgctaaacttcaatctttttagaaactctgtacaataagttgatgtaactgatatttagcataggtatcccatcccatccctttcttaatgcctttaaaaattattttatttatggctttttttttttgagatggagcttcactcttgttgccgaggctggagtgcagtggcgcgacctcagctcactgcaacctctgcctcctgggttcaagcaattctcctgcctcagcctcctgaatagctgggattacaggcgcccaccaccatgcctggctaacttttttgtattttagtagagagacggggtttcaccatgttgggcaggctggtctcgacctcctgacttcatgtgatccgcccacctcggcctcccaaagttctgggattacaggtgtgagccactgcgcctggccttaaaaattattttaaaataacaggtaagttgtgcttttttataaattcaagtgattgttactttcctgggtgccaggaaaatcaaaattggctagttgggtttcagaactttaagaaaagtctttcacttacatgttccacttgaagtaaatatcgaagacatttgcttagcaataattatattgtttaaggaggtttgtgattgtttgtgcttataaccatttcctgatttagtctcatgaaattactttaacaactttcacccttcagctgccatacaaacaggtatgtctaaaaggcagtttcctcagaagcagactctgtgggagagatacttacataagtgatcttcagggggtactggcagaagaaacctacagggcagtgagagatacataaacagggaagggaaagaggctacgctaaggctcaggtgaagggtagtctcatatgagcacgtgagtagctctggagcataaactccaataccagatttttcccaaatattagggaactgagctcaggaattgtctagaagctgccctaagaactggaggacggtatagcatcccaggcattagccaagaagtttcctattggctatgggcaatttttgatgaagaatgcaagtatgagttgctggtttctaacacctgcagcagctaatggtgagagtagtagcctggttaaaaaaaaaatctgggtggaacatcatcaatattggttacaaggaagaacagaagcagtgagcagtaaattaagttgagaaagtcttcagagttattttccttaaagatcgtaaatactctagtgagcagttgcatctttgaacttatagaagcaataatttgccactacaaaaacccccagatggattgaaccaagcattcccagaatcttgtttcaaatgatgttttttttacattcattcatgactttcccttcatcctgcatcatataatatcatgtaaatgtcaaacaaagaaatcatgctgtaatttctccatagaactaggggaaaaatgaacagggccagccttagctatctaactctaccttaatcaccgaagaagatagtaaataccttgcaaggcaaaaggcaatgccaatggactgcagagaaaaaaaaagaaagaggaatgcaaatcgagttaaatttgaaatacactctggtattacctgccccttaagttggagataaagtcatgacagcattttattaaatattcttccttaatcttacacaataatctatatgccttacatatatgtcaattgtcttccaaagaaactgattatgtaataactgcatgtattcaaacctttactaacaactcagaaaagaaagtatatattcatcttaatataatgaaaaatatacatcaatattcaatgcagataatatatgtaaatgctcaatttaggcaaaatatttatagacaatacattatgaaaagtaactaacaatagaataataattttttgctgtttaagtataagttcttctggggaaagtatagactattttaagcacgaatcaacaataaagttcatatttcacttaaatttataaacacaacacatgcatgtataaatacatatatataggcatacatatggtttttgcttgtttgtttgttttgttttggttttgagatggagtctcgctctgtcgcccaggctggagtgaagtggtgcaatctcggctcatggcaagctccaccttccgggttcaagcaattctcctgcctcagcctcccgagtagctgggattacaggcgcaggccaccttgcctggttaatttttgtatttttagtaaagacggggtttcaccatgttggccaggctggtctcaaactcctgaccccaagtgatccgcccaccttagcctcccaaagtgctgggattacaggtgtgacccaccgcgcctggccatatgtatacataaagttttaaaagctgatttaatcatgtcccttctgtcaagagaatggaataaatagactatgtgtggaatgtgttcatggtaatactctattgctttgaggctggttcctcttatcatgttattactgctcattcttgaatgggtgatttaatcagaggtttttaagataaaagaacatagtgaaggttctgcatatagagttttcccagtttcacaacatgcagctatttagcataggtgtttctataactgttataacactgccagcttttgattttgtttatagtgccgtggggatccactgcagcctgtggcatcacagacaaggcagcatctggcgctgtgagatgggagaggagaattctagttgtagagtactaaaacatttgctagcacaaatctgctcaggatttccttttctccctccccatggtaattttgtttttctccatttatacaaagtgtaaatagatcaaaaacccgtttattgaagaatcacaaacagcaaagtgagaaatctaatttagaagaataagcccattctgtgcccaaacatttttttgtgttttttttttattcatgcagtttggcattatctaacatttggtttttccttcattatactgagaaacattttagtcatcttatatagttctctgataatttttttctttcagaggtcatattgagaagctatgcctttttcatcctttatagaagtgatattcttggaacacactctgcttgctattcttctaatatctacaaaaatatacaaaagagataatgaaatatttataatgaaacattgtactacaaattaagtttcattggagtgaaatagaagcctatctcagagtatgattccattggacaatatggtcattatatatatatattttcctatattactttgctctaattgtactatgatttatttctataatttcacatacttagttcttctacatgtaaattatatatgaattgcattttatattttgaatatttataaataaatactaatctataattttctttgaagcaaattttttccagttataaaaacacaaatgctatgaaataaagcagtacttcagtactagttaatagattcttctccggtggctgtaagaggcattttcttgtttattgacactttatggcatacgtttttgggttagattcttaataaaatggatgtaactgtcagtccaagaaacatatcttttctacagacatgtttagtttgattttacagtgttaaaaatagcgccactaacattcaaaagttggaagatttcacataaacatgttaaaataaggcttctcttgaaaaaaaatgggaaatgctggttgtaatagaccctaattttaacctggcaacacttggctgcagttgaatggcaatgtttacttcagttggcagtgcccaccatattctctggtgacatagtgaatgcttacaaacttcaactcagccttttgagtttttttttttctttttcctatttaaacaaacaacaaggtcccagtagagacttgagtttgggaatcctgcccaaacagattttgtttattatcattgttacttttttttgcttttgcttttacacagtctaaggtaagtatccttcagttcaaacaatcagaggtattctggtcaagcttcctgaaaaattagatgaaactttcattcaataagatcataattcactatattttttctttaatttttatacaattattcttatacaaaccgttcattaataaaaataaaatgtaacacgtttaaaatttaaaagtacatgtttcattcacaaagaacattttgatgtaatatattccagatcactcacataggttaaaaaatatttaaaacagacttttaacagtcagcaatatgctggtaacattacatatatatgtatgtataaatgaatatttatttatttttaaagtgattatagtctagtgactaatttacaacatacgtttacaatgaaaatataaacccattcgatgccaaaataatacatgactgcattatcattttaatggctatataatattctatttcatggatattaaaaagaattactactatggactacaacggatcttccattatgagcattcagattccatggacgtttttgctattaggaacattgcttcctgacatcactaatgcagaaatttcccagctgtgcttagttattacctggagacaaattcttgatgaaatttagcccgatgaaagtacccatatttcgaagactctaatgcctgttatcacattgcacttagaaatattacaacgattcatacttctaccaacagcatatgaggaaaccaacttctcctcaccacatagtggtattagcattccattaacagagaggtattcacttaatgaggttttagaatacagaaaactaatttgtaaatagcagtcccaatgttatttcagcacagggatgtgtccattaaagtccgtggtgtccaatcattcattttgcatgagtgctatggcagagtgatcaaggccccgtgacctagggtgagttctggagacaatctgcccagatttaagtgtagcattactgcttactagcagtactatttcaattgcagactacttattttgtctcttttttgtgcttttagaaaatgcaaaatatcttacagagtacgtaaaatgaaaacttttataatatcataatatatattatttacttttctttttcattatactttaagttctagggtacatgtgcacaacgtgcaggtttgttacataggtatacatgtgccatgttggtttgctgctcccatcaactcgtcatttacattaggtatttcttctatgatttacttttcaatgaagtaggtaaagactagtttacatacctaaaacatatcattcagagttatattattagcaaacatgagttagatccaaaccaaggtctccatgcttcagaagccagttcttttttttttttttttttttttttttgagactgagtcttgctctgtcacccaggctggagtgcaatggtgtgatctcagctcactgcagcctctgcctcctcggttcaagcaattctcctgcctcagcctcccaagtacctgagattacagacaccggccaccacgctcagctaatttttgtgtttttagaagagatgggctttcaccatgttggccaggctggcctcccaaagtgctgtgattacaggcatgagacaccgtgcccggctgtcagttttattttttgcatctacattgatgtttttccttgcaatatttaggacttcatttttaaatgcacataatttcaacaaaactaaagagagtttcaaaaggagatttacaacagattttaaaaggtccatcatatgctggtaatatctcctacttaatgttaacaaacaattagtgagttattttgcattaatttataaaaatgtgaaacattcttaagactttttaaagcaattgctttaaaaattattctcagttttaaattttcaaatacattcagacatttaattagacatatttaggaactctagggcctgaaaaagaaagaaagcaatgagtagtccatctttgtaaaaaaggaaacattagtaaattgaatacaagataaagacttagtagaagaaaaagatagcaagtattccttagaaactcactaccattatgttagcccctagtcaggtttagttttttaaatttacatttacagtaattaaagttaaattaaatgaaaacttcctttctcaagttccctagccatattttaagttctcaattgccatatgtggccagtacgtactgcattggacaaggaattacagaatattttacataattgcagatagcattttattagaacacaaaacaacgtttaatgggggaaaagtatcacatcgttcatagtcaaaatgttattgccaaatcatcacttttttcagagttcttttctcaagaaaagtgcaagaaataaaacagtgaagtaaatacaggacacattagaaaaacagttcaagtaatttagattctaccacctttaaaggtggtatagacaggtagacagatgatgaatagagatagacaggtaggaatatgaaattacagtgtagaatggttttgataattaaataaaatcaagtaaaatagtgcatgtaaaatgtagctggtacaatataactatgttatactgtgtgttaaaaaatgagaattctttttaacactatttactgaaagtgactaaaatacaattcttgatattcaattaactagatgaaaagagagttaaaagaaacttattctagacctaaagctccattaccatgtgacagaaaatgtgatatttatttccatagtattgtatgtgtggaaaactcaaaactgtaagcaaatgtgacttctatcaaaaatgctgtatttgaaggatggaaacggcatccatggctctgattcaatactggcttcaatggtaacgtcaatactgaggatgaactaatgtaaactggctttagctaagcattctacttaaagtcagaattaggcctagatcccagattttctaacaagctctggcaaatagatactctaattatatttttggcctctgcaacattatgagtaatttgttaattctacatatattatttgtctaatatgtgatttgcattctgtggaaatgaaaaatatctctgtccttatggggcttatatatttatggagcagcagtcaaattggtaagcaaaatttgtaaataaattaatgagataattttacattatagtctataatgcactttcagatatagtaacattaggaatagacaacacttaacctaaggctaataaacctttaaggatttgactaagcttacacttcattcagtggcagatctgagtatctactatgagagttttaactgcatgcatgatatttttcttagtctgttcaaactgttagaacaaaataccatataccgagtggcttatgcacaagaaaaacttatttctcacagttctagaggctaggaagtccaagaccagggtactggtagggcagatctgatgtctggtgagggcactgtttcttttcataggctgcatcttccaactgtgtcctcacatggtagaagggatgagctagctccttggggtctcatttataagggcactaatcttacttatcagcgctttgtcctcattacctaatcacctcccaaaggccacacttcctaataccatcatcttggtggttaggttttaacgtatgaattttggagggacacaaatattgaatctatagcagtattctagtatgataatatatttaatttcaggataaggcatctaaaagaaatcattaaagatcgaattcatatattaatagtttgattttcttacgggaagataaatataagttacacaaatcttttcttgttcagtgccttaaaatctccctaaatgaagatttataatttaacttggtagtaaactttgtgattttgcaactccagcattcaaggcaatactatatctaagggagaaaatcaattttaatgtaattttattctttttttttaatttctgagatctttagttgcatagcacaaaatcgagaatcaacccacactagggttgagttttatatgactaggttttgtgtttctttggcattgttggtttttgtttatcctctattcctgatttcatctttcttttctgagatatgtcccaaatgcactgacgttttctttcttccaagccatttgctacatatatatatatacacacacatacatatatatacgcatatatatacatacatatacatatatacatatatgtatccttgaaatagatattgtttttattaaaatatattcttgtagttataattaataattaaataaagaggattttgttcttcagtattaggcttagaggggcttattttattctaggtatattgtcactaagaaatacctaaaatataagaaaaacgtgtcatgggcaaaagacaaaacaccgtgcgtcagtctgaagcactgaaaccggatgcacatccacatctattgacaagtttcagtcttttggtgtttctcagaataacagaacacacccagttagcctctgtattagtttcctattgctggcatcacaaattatcatgtactcagttgcttaaaacaatgcatatttattccattctggttctgtaggtcagaattctgacactggtctcagtgtgctaaaatcaaggtgtcaatagtgctgtgttcctttctgaggactctagagaatgtgttgctggctctttcaggtagttagcagagttcagttccttgaggttataaactgctggtttttcacagagtccagaaactgcccacatcccttggcttatggctcctttttctccgaagccagcaaaggtaggctgagtttctctcatgcttagaatctctcttgcctcttttctgggcatctctctgactcaagctctggaatgttctttggtttttaagagtttttgtgattacattggaatccactgtgtaaccagggataatcacttcgtttcaagatccctaatcacatctgcagagttccttttgccatataacacattcacaggtgtcagggattaaggaattgacatcctaaggttgatgagttcattatttggcctaccagagctgctgcttcttatttgtttattaataagtaaacagactttatttttcagagtagttttgtatttatgaaaaattgaggagaaagtccagagttcccatacatccttctccaatctaccttcctcctccccagtttttcctgttactaatattttgcgttagtatggtacatttgttagcattgatgaacaaatattgatatattattattaactgaaacccatagtttaacttagagtacactctttgtagtcttcagttctatgagttttgacaactatataatgtcaggtagacacattgcaattataatacagaatagtttcaattccctaatatttcccctctgctctagctagtcatcccttctttcttctcctcaatttctagcaactgctgacctttttattgtcactgtaattgtgcttttcccagaatctcatatagttagaaacaaacagtatgtagtgttttcgaacctgtttctttcacttggcatttaagattcctctatgtattctttgtggctgaattgtttatttctttttatggttgaataatattccatgaaatgtatgcaccccagtttatctattcacctattaaaagacatctcgattgcttccaagttttggcaattatgaacaaagctgctataaatattcatagatgggcttttgtatggacataagttttcaactcatttgggtaaataccaaggagcacaattgctggatcatatggtaggactatttttagctttgtaaagaactgccaagctgccttacaatgtggctgtagcattttgcattcccatcagcaattagtgagagttcctgctgccagcatttgttattatcaatgttttggattttagccattctaataggtgtgccatggtatcttgttttaattttccattttaaaaatgtcatataatgtttaacatcttttcatatgcttacttgacatctgtatacatttttgcacagcctgttcttcaaaaaataaaacaattcacttattttctgaaaaataagtaaatgtaattttatgtgcagattagtcacacatacttgttagaacctacatggggatttcaaaaagacagaatcctgaatcatacaaacctctcccaaatacatcacgaccagctttaaatcaacagcaaagggttgctagaggcaaaagcaggaagattgtgaggaaggctacaaatctgacaaactctacaataatagaagagagcttggcagaagaagatgcatggagcaccaaagaagagagtagcaatgcctggatggctggtgctggaatgtttactgtacacagatctgcaagagaactcaacaggtagtgtggcttctctctagtaagcctgggggcactagctattgcaccagagcagactagagaacacactggctccctggctcatcacttgccacagaagtatatacttacaaagttgatgctgctttatatactgtcatacaaaagctctgtctgaaaagaaaccagagatttggagaacaatacctaaaataggtaacctaaacttaagagcaattactgaaggagacagatggaaatgttaacaaccatcactacataacagcagcactgaaggagagtccattacagtttcttagacatcattttctagtactacagcaataaaagatatgatcataatttaaaagtccaaaagaggaattgaaaaaaaacaccatagatactcggaagttcaggtggaagaaatatatccaaaacagagccaaggtatgaagagtgagaaatcagaaagaagaggaaatataaatgacttggaagacttcttgagaagactttatatatgtgaatttttgcagatactagaaaataaacaagagaatgaaaaacaaaaaataagaaatgaaaaacaaaaaatgtatgtgtcaggagtgatatcagatctgcatctcccgagtaaaagttcgcatggactgaaaggcagaattgatgaagatatacacctcttggcatattttggtaaatcctctaattcaaattttacaaactttcggaagaaaaaaacacaacatttgtggaggaaaaagaagtagactgaacttgaagttcttaactaaaatactgaacactgtaaaacaagtggatagtactacatatttgtagttatattcaaattgagatgaataggctgatgaatcatgtaccttatctgctaagtaagtttttttaattgaaaagatgaaatatatgacagggaaaacatagtgacagtcaattaaaagaactatgcttccaaataaaaaaagctttaagaagtcttcttggagtgggattggggaagcttacatacttaactattcacctctgggcaagtgaaggacagagtgataaaaatcattaggaaggctaaaatgtgaacatttttaacctcaaatatactttttttttttttttttttttgagacagagtcttgctctgtcgcccaggctggagtgcagtggcgcgatctcagctcactgatctccgcctcctgggttcacgccattctcctgcctcagcctcccgagtacctgggactacaggtgccctccaccacgcccggctaattttttgtattttgtttagtaaagacggggtttcaccctgttagccaggatggtctcgatctcctgacctcgagatctgcccgcctcggcctcccaaagtgcaaatacacttttttatatttaagcatggacaccttggttcaattgttatgaaataaagcaaataaacatatcatgaaagatatgattagctatatcagagcatgagtaacaaccagatctagtgacaacgcacacactatcacgagaagagcaagggtgaaatctgatcctataattcaatcacctctcatcagaccccccccaccaacactgggaattacaactcgatatgagatttaggtgggtcacagagccaaaccacatcagggtatttgtctaagaacaacaataacaacaaaattgttggttctgttattaagagaagaatgacaatcgggtagacaagtcatagcctctgccttactggatatgtaagaagcccttttaattaagtaggagaatgataaagagtgccccagttgaaattgtgggggatatagctatagagaaaatacaatgataaaatttaaaaatgaacaataattatgaaagtatatcgaaacagtggtaattaatttaagatagctttcagtgaattatgcacaaacaattaacaactgataaaaactcattattggggaagttctggaaacttcctggaaagccacttggcactatctaatgaagttaaataaggtacaaatcatatttccactgattatttggtcccctgagatataaatcaaataatattatgaagatacatttactccaaagttaatcacagcaataacatacaaaagtgaaaaatttgaaaataaattataattattaaagggagttagttaatagagtaaatacatataaagaagcgattgcaaatatatacatgtacatacatctatgcatatcatttcagatatataaattctaattacagtgtattgttaaacagtacaaactgcatatatgataagacactacagttctttaaaacataaatgtgtatttttatttattaatgaagaatgtaagtctgaaagtgtatgtgccaaaatgttaacaatattcactttctttttttctattttattgtctgatttttaaatttatattatgtttacaaccagaaaatatagatatattcagggtaaaattatgcttatttaacatacttgatataaatactagaagaaatttacaaaaaggggagaaaaatatttttcttgtatttgaaaaatgtttcagaatatttattttgtcctttttttcttttgctacttaaaaaagaatgtcttaaccctaatcttctaagcaataggaataagctattgaaatataggaagacaactattttgataaatcaagcaccttgtatttaaaacaaaattaaataaagataaaaacttttatattatatatttaagtagattttattttatatttaagtagttatacaaagttaaattttcaaaattggtgtctgacagatatctattttttcagaataatcatataattgacgtatatttgataatcacctaaatgttctatgactgaaaatttgaagacacagaaaaatagaatttaaggcccaataattgtattttgaaaggtatagaaaaacatagatctaaaaatcttcttttatttaaaaatattcttaataaatattttatgccttagcctaaaattagtcgatttctcagctcagatgacctacacaacttttttggtctatccccgcatgtgtgtctctttcactgtttacactatactgtattgcattcttttgcaacttacatacaaattttactatgaatatggccataggccctgctttaaggacttccccattgaaaaataacctatgcttaaaaaagaaaacgaagattaaaattttaggtaattattttcttgtttttcattagttttttctaaaataaattttgttgtgtacatttaaggtatacatgaagctgtgggatacacataaagagtaaaaaggtgaccatagtgaagcaaattaacatattcatcatttcacataggaacactttttgtttgtttttgtggcaagagaaactaaaatctaatcatttaggattaatcccatatagggtacaatttttgtttgttcagacgtttctacaatttgcacaggtaatagcttcatctgtttcaaagtcaactctaaaaagagtagacagttaatattttcctgttcatatctgcttccaaaccacctggtttccttccttcctggtgaattcaaattatcctttttttttaaaaaagtaaactttcagagatattttatgcagcaaggaaacaagcgtacatatttttctcctcttttaagaaaacagtattgttcacactgttctgcaccttggtttttaacttaatattcataggaaatcattccatatcaatacccaaaggacttcctcattctttttcataaacacactttatctatgtgagaatgtatcaaatctgtttcaccagatccctaaaaatgacatttagtatgcttccaattatttggaagacatatttgcttccattacaaataatggtacagtaaatagccacataaatagtcatttcccacatatcttagtatatttataagataaatttctggaagcaaactttctgagtcaaaggatacattcttgttattataaggcttagtataaattatctcaaaagacaaaaaataataaactttattattttaaatagaaaaataattactatcatttaccagcatatgacttttatcaatgattgatgcaagataaaggtacacatatttcatagctactcactcagtttcacccttgttttacttcttgcttctttaaaaacagactcttggagtggattttgaaatttatttatacatgtacaaataactgaataatctgatcaaggcttaaaatttagaagaaagtcgagatggaagtatctttcaacaagtcagaaaccttaaattaaataaactatttagactcattgaatctgtaatgtatcatcaaatgatggaaaatagtttgttttggagaggaaagaggaaaggaagcagagtccttttgccagacatgaattcccaagggatatattcattactttgttgcttatacaaggccatagaaatcaacactcctacaacacagatctttgcagcaggctcctgtgaaacattggcttcacaacatttggcagagctcccatcccctgcttatagatcatatcatacaaccagtctttcaattatatttgctgatgtaaaaaataagtgaaacacatgcatttttctttatgttatttttcattcataagaacatttctaaggcatttattattagtatttggttcccgatgttttactaataagaaatcatgttgtatttcatgaagcttctttgattagcaattttatttctattccagggtgtctatgtcacttataagaaagctaaccagatggaatcatctggttatttgtatattaactactgtcagagttttaatagtaaaatgatttccttgcacaatgtggcggtaatagagtcaagctgtggcttaaatagccttcctaatggaggtttcaagagaactgagaggatttataaaaatttactttgtgacatgcctaatacgtgtattatgtgtgtcggtttttccactgcaacagaaagaaaggccaatacatttctaaattgtatattaaatatttataaacttttctaaacgtgtgacataaaaagtatctggtcagttcccttcactataaattcagcttatgttcctatttatggtgctgctggagcaccacagccccgggtctcacactaaatgcttacttgcagatccacctaggtagttctccgtagagggaagagcttcccatgatcttctccacaagcatttctttcaaagccgcgttgcaggagtcacacataattgccagtgttccagataacaaacttcttatttccattacacttagaagggaatacatttatcatcctaaatgatactaagttactaaaggatactgagaacatttatcaccctaaatgatattaagattaagctcctatagcaattttgtagaggtcagtagtaggcatagttaggaatatatatgtatacatttaggtgtatcagtagaaggtttgtgacaatagcagtttgattttagatgatgctgatgtgaatcaggagataataggaagaattgcagtcatgcacacattattttcaaagtcatattctaatgctccaatttcgaaaatagttactagtgtctggtaattctacttttcatttgttatcaaccaacatacatttaaattttacaggattatcagcaacacacaaacacagacatgtacaattagtgtaaaaacaatgttgatggctcctgttaaatcatttgatgttagatcatttcttttcaagtattcttccctactttgacagtttttttgtttttaccaggaaacaacaacaattcactatcaatagcccctttctcctgccattttattcccattttaaggaaacttgcatgggaaggaactgtgtaggtgaaaaacagaggaagaaaaaaaatgaaagaagagagataaggcttaaaaggggcacaaggaagaaggctctaagaatagaagacgaaagagaccaaaaacttcacataaggaaattttctacaatctccagaaagtagcatataactttttatggggggaggggttgcattattttttaacagaaaaattttgaaaattttttaatatgggagaagaaaatactaaaataattctgcaagtctaaaagtaaagaaaatatggattttataaattagtaaaacatcataatttaataccctgaataggaagataatctaacagagaatgtagacattaaaaggaaaacaactaaaataaggaaatggtagaaatgcttggggttaatgaggaagacatttaacaaataggaaataaattctctatgtttaagaaagacataatttgctaaattattcatttatttaaaaccaaacaagattaatttcaagagaaaacacttcaattaatttagataaaatgaatgcatttaaatgtgccaagaattcaaatttcccaagaaagcctataaattcatatggaaagaaagaaaactgtcttgggtttatcttctatcacataacgtgtcaaaggacaaaagagaaattgctacattattgtgagacaaaggtttatggcataaaaattcaaaacaaaaccactttgctcttcccgtgtgaaggtaatcaaatgatactctttagatatgcagatctcagaaaatgtatcatccacaaaaatttcatgaaaaacattccatccacaaagttatattccagtcaactaagattttttttaaaaaatgaaaacaaaggcgtagtataaaattactgtcagagaatattgaaagcagttacatatatatacaaacacaacatataaataatcattttatatgcctacaaatgaaaatccaaaataccagatgtcaacacaaccttgaagctgataaacttaataaactgggaaagacatttaaatacagtaccattttacgtttacataaatgataggcaacagtaattttattgtattatgtaaatatttaaagaaacatatatttaagtacacatttttcttttttttagttgttttatagaatttttttatttccaaaaataacacatcatcaagcaaaaattcacatacatcacggtgtgtaaagacatggttagtaatctgtcattcacactcagataatttcacacccaacctgtaataaatatgcatctatatttatatttcttttcataaatatgtataaaaaattgaaagtggaagtctcaagaataatcttgttggagtttatgttctcaaataacataacaaaataaatgttttaccaacattagtatattggtaggaattccactccaagtgaagtaaggtccaggaatttctcctcagtgatattgaatcaagtttgaaaggccaaattgataactcttctttatgagaagtctcaagagaaatttaaaaatgttgtaaactaaataaaataaaaatatgggagttttcaaaattttgttgtgggatacaacaaaacagtgcttagagaggaatttatagcattgaatgaacacattagaaaaaagaaagatcaacattcaataacctaagcttctgccttggagaagagagggaaagaaagagcaagttaggttaccgaatacagaagaaataatgtgaaaaaacaacagaaatcgatgaaagtcaaaataagaaaaccaaaaactgattctttgaaaagattttaaaaattgataaaaccctagcctggctaaccagacaaaatgtgagaaaaaaatgaaacagaagtctttactccttaaggcatagctagtgcaatgagacaagaaaattaaattcaaagtatatagatttgaaaaaaagaaataaaattttctttatttgtagataaaatgtttacataaaaatcttaaagaattgcacaaaatcacaaacaaacaaaaaaacttggaactaataagtgagtacagcaaggttgcagaaaacaatgttaatataaccaaagttgattactttccaatgtaccagcaatgaataatgggaattttagattacaaacaaaacaaacaaatccaacggtactattaacactagcaccaaaaagggaaatactcagttgcaaagctaacaaagtatgtacaagacctatagtggaaaactattatacaaaattctgatgaaagaaattgtagaagatgaggccaggcgtggtggcttacgcctgtaatcccagcacttcgggaggctgaggtgggtggatctcttgaggcaaggagttcgagaccagcctggctaacatagcaaaactgtttttacaaaaaatacaaaaattagctgggcatggtgatgtgtgtgtgcctgtaatcccagctactcgggaggctgaggcaagagaatcacttgaaccaaggttgcacttagctgagaacacaccactgcactcaagcttgagtgacacagcgacactcaaaaaaaaaagaaaagaaattgtagaagattgaagatgtaattacataaaggttttccacggaggtacctgttcacatttctgaaaacactttatatatgaaatgaacaattaaataggtgatagcagatggtagaagctatgattttctttattggagtaggaagtagtgggggctcgagtgatccatactgttataatttggtggtgtgtcctttccaaatttcatattaatatgtgatctctgtcctctccaatgttagaggtgggcctggtgaaaggatttgggccaacggaggtggatccttcttgaatggcttattgctattgtcatggtaatcagtgactttttgctctatgagtttgcctgagatatggttgtttaaaagagcttggcacctcctccctctctctctttgtctctctcaatatgtgatatgcttgctgccccttcaccttctgccatgattgtaagcttcctgagactttcctaggagcagatgccagcaccatgctcctcgtactgcctgcagaactctaagccaaaataaatttctttcctttatcaattaaccagcctcaagtattcctttagagcaacacaaacagactaacacacatatggtgataaattatggttggataaacgactatgaaccgattttagtttaattagatagctgatttcacatataagtatttatagatatgtgtatatatggtttaatagaatgtactttaaatatttttcaattttctgtatattatgttttgacatcttagaaacctttttggctggggagagactgctcttcccaaggctagccaatttataaagttaacaaagggcttggccagagcatctaattgatagcaaattaaccaatgcagagacatacctcctctagcctgttcacctccggaggccatattcctgtcttaatcatcccaaggcaaaataccaggcaactagagaccacccttagagctcaaagaaagcagaaatcattcaaactagccagtccttactgttcatcttaccctgtcctgtcttgcctcaataaaatcagtgacctaaaccttcctatcactcctgtgtcctgcctcctgaccaccttggtgtccttcccttgttgccttgtgtgacacgccatgtctcctgtttcattgggcttacgagtataataaactttttttctccaagtctcccccgtgtttccttttttggccatatctgacagatcatcccataaataaatacaaaacgtatatatgcatatatttcatcactgtcagctgagaggtcctagaaacaatgacatctcagtagtcatgagtaccctcagctcccagatcgtggtttgtaatacaactttctaataaatgaaaccacggatcttcagagaattggctgattcgataactcgtaggatattaacaagatgagccaggagcatcttatagtgccagaaagtgaggaagtgttcaaaatagataaacacgttaaaaataatgataataaaaataaaaactgcaataactataatatgtcaaaagaccaggagccaactgaaaccgccttcaatggccaaaaatgaaaaaaaaattgagcaataaaataaataaaatgacagtgaattataacccagagtatagagtatatatgtgagtccatactgacagtaatacataaataactgaatatgtaaattaaataaaggaaaatacacaaatctgtgcagaagaattccaagtaacttatgtagttagagcaccttcaagaaggggagtgtaaatccccacttcttacatgcaggctatggatagtaacttccttccaaagagtacaatactcctcatagtggagaaatttcacaaaccctaccttagccacgttatcaagtttaacttcagtaatgataagtcatattgaaaatatgtaccttttatatatcatggcaaaaatgacactttacatctgtggccttcttctaaaaaatatatacaagtttaatttaatcatgagaacaccattagacaaataccaattaaggcagttgctataaaatcctggtcagtacacctcaaaactgtcagtgattctggtaggttggataattgctccgaatattggccatcttcttatcccaggaattttgactataatatcttacatggtaaaagggaccttgtaataaaattaaaataagcattctgagattgacagattattctggattatacaatattttatgtaatcacaagagtccttagacttattatatagcagtgtaatcacaatagttcttttttttgatttcttttgtttttattgaaatggagtctcactctgtcacccaggttggagtgcagtggcgtgatctcagctcactgcaacctctgcctccaggattcaagcgattctcctgcctcagccaccgaagtagctgtgactacaggcatgcacctcaaagtcaggctaatttttgtatttttagcagagacggggtttcaccatgttggtcaggctggtctcaaactcctgacttcaagtgagccaccaaccttggcctcccaaagtgctgggattacaggcgtcatccactgcgcctggcccacaagagttcttatacgagagagacagggtagtcaaagtgagaaataggagatttggcaatggaactagaaattggagtgatgggaagaaggggtcaatgagctgaggattataggcaacctagaggctgggaaatggaaggaatgggagattccaagaggaaatgtccctgctgaaaccttgactttacaccagtgagactaatttccagaagtgaaagtttactttgctgaagttcgtggtagattgttacagcagcaataagaacctaaaacagttataaaactcaagaataccctgagacattgacacaagcaagcagaagctaaggagatgtgaacactgtgtaaagtggtattctggatgagatactgttagagaaaataaggacattaggggtaaaactaaggaaatctgagcaaagggtggatcttaataataattataaacataggttccgtaattttaacaaatgtatcatgctatcattagatgttaataataggggaaactgagtgtgtggtgcatgggaactccggataatcttcataattattttataaatttaaaacttaaaacgaatgaagtgattctaaagcaatatattctgatgaataggatctaaaacaaaaacgactgaatgaacaaattaaccacgaaaaactgaataaaaataataagtttacagtaagagtcaaacattagtaatgtgtcaaaatagacagaatttaatatgcagaaaaacatgagtttttaaaaattataggacaaagtttaagatatcatggatataagctgaaggaaaacaagaagaatttcatttgtgttattaggcaaagaaaataaatgttacagaacttgggattttatataaaatgttttatttaattatattttggagaaagaaaatttaaacttaatgaaatatatttagaaaatgagtaatcaaaacaataaatatcaacattacacatcactcatgacttttaaatgtaaagtcttatgtgcaattttaaactaaattattaaaaatttagataaagcacattatttttaaaacagtagaaatctccaatgtttactaaaaaattagacaaattgctataggttgaattttttttttttttttttttttggaatctggcaaaggactactttgaacaaagttcccagtactaagtgctcttatgggaagtcatttcaaacacttatggaatagatatgttacagaaattgttccagaacaaagatgggaaatatccaaggtcactttgaagctaaaaatctctgataatcaaacctaaaatagatgaactaaaaagaagatcaacaggccatttaactattgtcttttgtgaggatgaatgctgtaccgcttctcagtcttttggttaagatcaagtgaggatgcatgctgtaatatttgtggttgctagaattttaagatgatcctcaaattttccactcacctgctatacacaacacacataatccccaagactgttatgatgaattgtaccctcataattagctaatgttatatggcacaaatgtttaaatatagattatccaggtgttcctgagcacatcacaaaatctctttaaagcagaaagatttttttgttttttgttttttgtttttctggtaatagaaagggaagtcaataatttgaagtatgagaaggatctgactaactgaaaatgaggaagcacacagtaagtgtattagtcagggttctctagagggacagaactaatagatgtatatatgaacgggagtttactaaggagcattgactcacataatgacaaggtaaaggtccacaataggccgtctgcaagctgaggggccaggaagccctcccgagtcccaaaacctcaaaagtagggaaaccaacagtgcagccttcaatctgtggcccaacgcctgagaggccctggcaaaccacaggcgtagctccaagagtccaaaagctgaagaacttagagtcattgttgtagagcaggaagcatccagcacaggagaaagatggaggccagaacactcagccagtctaatcctcccacgttcctctgcctgattttatcctagccacactgacagctgattagattgtgcccaatcagattgacagtgggtctgtctctcctaatccactgactcaaatgttaatctcacccccacagacacactcaggaacaatgctttgcatttttcaatcccatcaagttgacactcagtgttagccatcacagtaaggactctagaagctgaaagtgtctaacagctgacagcaaggaaatagggacttcagtcctacaaatgcaaggaactgaattcaataaacaaaaagaatgaacttggcagagaatttttttccagaccctcaaatgaaagctgagttcagccaacatcttaatttcaaccttgtgatatcctaaagagagaaaacagatgcaaaaattgttaagaacaaagaagtttcatgcagcgtgattaatgagcttggaataattaaccttgatataaagcaaagtataattgcagaaattcactttatattagccatacagtagatatgagcaaattttacagaattgtcatatacatcaaatcctatggtctcaatgcaattaaattagactacattaacaacatgttaataaataaaatcttcacccaactggagattgaatgtttttaaaaacctattttccaataactcatgttataaacaatgaaatgacttgagaactcatcttaaaaaaatttcagcatacaaatgtttggataagaaggaacagttagaactcacaaggttgtatatggaaacaagatgtaaagaaaactctgctgccatggaacccaaatgagaaagtgcggcaactgataatcactcttagaaataatgttgtattgtgcaatatcatcaacaaacttaatgcttttttgccatcttaaaaaattaatttatgatgctttagttcaaataggtcttcagtaatttgtgtttttttccaaaattaatgtatgtttattaaatgggaaacctaaaacccatggctgtaaattgctgtttctgacttgagctgacatttaaatccatacagtatatgagatacatgatctattttctctgaagcatcactgtgttacaggatctttggagtgttggttttctggctggaaaccttggtggccagtgaggcctttgcctgagttcctgtcctgtatccagaaagcatgaggtacacagacaagtggagggtgagcaagaagaggagctttattgagtgttaaaacagctcagaggagacttgcagtgggtagctcctctctgtaggcagttcatcctagccagtgttcagctctcagcagagaagaagccctggagaaggtagctcctttgtgctgctggtcgtcccgacgtctgcccagctccaagcagagaagaggccctggaatgggttgctcctctctgcagctggcagacctgcctctcttcaggtctctgaagctctcagtgaagggtagctcctctctgcagctgatcatcccatctgctcagctctggatattcctggagcttttatgggcctcagaggggagaaagtgcatgccctttggtccatgggtggccatggtcaagcctggaaagggcaccacaagttctcacttcaacagtgggactggcagcccagcccccagccttcaggccctccctggcctgaaggtggggcctcactggggacctgcccccatctgtgcaggaacctgtttgcctcctctgccttcatggtaccagggcttggccagactttgccccaagatcagagcaggtgctgacagcagggaggagctaggcagtgggaacaggcacttctcagcctgcaagggcaggggatccttcctgggcccccaagagtacagggatgcctgagtctgcagccctggtttgggtggctgcagctgcgcccaggaaggcagggctcctgcctgctctgtggagcaggaggcctgggtctggagtcgcagtttgggcagctgcagcggcacccggggagctcctgcactaactcagaaggggcagggttcctccttgtccccagctcctgctggctccatggagcctgcagccccggctgtgattccctgctgtagcaggtgtgatggcagccagtagctgctgccatcaattactcccaggaatctttatggtcaattcagaaacattatttcaatcccagaatacatatgatgattcaaagcaatctcaggcatttactgaagtcctttaatatcacattccaatttctaactcattggatctcatttccattttacaatagtttgcctaaatagttaccatcaggaaatgcttcttcaagcttgatttccatgtacgccccgagctttcttcacagctttgtttcttttgggccagaagatattctttcatattttaatatatttaattttcatcatataagatctacaccatagaatttatttttaaaatttcacaaaatactttttgtcttctacccttacattttttcattcatttgtttttatttcaaagaaaaaaactagaatgtgccaatccttttggacagaagtaacttaagtgcctatttttgtcatactttcttgcaagtcctttagacccttaaaataatttcaaaatttatcctaaaatcctctttggaataaaaattcttgacaatttactaaaatgcgtgttatacccttgatagcggcaagtttccaaatccacgtctgactcttacagccaggtcatttaccaaagcggcccaataacagaggtgtaagaaagtaggggtggttctaggttcatgcctaggcattaactggcatgaacctagaaccatcctggcacttttctctcttctttattttctacctgtttcaggtgggctccttttcctggatttaatttccaagctttatcctctgatctctttttataattgaatcagccactaaagatgacttccaccattttgaaccccagaaactctgtataattttcagttttgctagccacagccacccagtcaagtatttaccaaacatctacaatgtaccagaaatagcaaagatataccacttcagtcgcaagttatgttttgtcatggaaagttcttgtgtgttaatccacggtagcaaaatgcacacacacacacacacacacacacaatattcctaaggtgatgaaagaaagaactgtaaaaccttaaacaaaataataggtatattttaaacaatgttgctggctagaatttccataccaaggagatgtatactctaaaatgtccaggccgggcgcggtggctcacgcctgtaatcccagcactttgggaggccgagacgggaagatcatgaggtcaggagatcgataccatcctggctaacgcggtgaaaccccgtctctactaaaaatacaaaaaaaaattagctgggagtggtggcgggcgcctgtggtcccagctactctggaggctgaggcaggagaatggcgtgaacccaggaggtggagcttgcagtgagccgacatcacgccactgtactccagcctgggtgacagagcgagactccatctcgaacaaaacaaaacaaaccaaaacaacaacaacaaaaaaacaaaaaacaaaaaaatgtccagatacagctcacagaagcttctggtccactattttctttcattacttcagaatcattttgcttcatgttagaaaaactatgagttccaatgaatgatccaaactggtttgctggtggaaatttgctaagactgactttcagagtattttattgactgatattggtataattgggcaagaatagtctagaaaaaattcaccacccttgaacaattttagctctaaaaatatttaaaattctcagtaagacttctgagaggccagagtaaaataatgttataaagctcttacaatgcactaagctaaaattgttctccgtatggataattatacccaattccttgcatttattatgaaagtcaggaagatatttgcctggggttgaaggcatcgctatattattaccctttatcagaactgtggtcacatagttgaatttttttttagtaagacaataaggtaaaaaatcatcttaaaagtcagtgcttgactaaaatttgaggcattttttaataataggaaatccatggctcagcctaagttccagagtctgtttacacagagccagctgatgaaatatactgatgcttttttaaaaattaaatggtgctaataatagatatttttgagccacttcaaagtaaacaaaatacaacagaatcagaccatatatatagttctttccttgttgtagctcatggttttgacaacagcacttcttaatttttttgtctgcctaatctttttttatctagtcaggagcatcgcctctcctgtgaattaggcaaaaagcaaaaatacttacaaatataattcccagtgtcaatattttttcctgtatttctctccttgaagttctttcagcctgctactgtgaaacttactcctagatcattattttcatcctttaattttgacatttccacagaacaaagagttcaattctcatttcccacgaatatgactcaggctattcccacatctgtgctatcacttttcagaaaatagggacctccactttcaatcacaaaaggagaagtttatttttgtccaattcaatacgtattttgagagtttcatccgatagtgagtttcttttttctagaatgctttagggttagttcatcaaatatttcaaccattttagccttcttctcattatctgtttataaatgaggtaaattttaggaaaaacacctgctgatggccatggttttaggctttcaagttaacaacatagagaaagacaccaagccaaaaacatcagtcataaagattatttctcctgatactatttttaatttttaatgaggcaaacatattcatatacatctatacacacatacatatatgcattatataaataagtatacatgtgcatgtgtaatttatatgaaaacagactccttaaatgcatatgatttttaccttggactatttttgaatagagaaaatgaaagtagaaaataggtttagggaaactttcacagtaatcaagacaaagacattattgatttaaaagaattattttcccttttatccttttatccaaaattatagtggacattttagactgagtagaaatattcagtctccccaaagcatattctactgcttaacactggtgcacccactttaattcgtaggtataccaaagaaatacggactttggggtgatagaagggtaataaaaccaagaaatatgcattttccaaagtgacattctgaggcctacattttagttgtttactaaagctctttttccataatatacagcttcaagtgaaagccaacagaatctttaatagcctaaacccagcagtgacttccctatttattttggacaataacaagattgatcaatttttttgccctttaatattgtcaagaaagaaaagaaatatttgatagtaagataacaccttaaacaaaatttgtatccccaactcaacttttttttctaatttttaatttaatttttaatcttgtagtaaagtattacattcctctgtaaaagtataaaaataataaatttttagctcagccatttttcataaagaaaactcacctatgtaactgtcatccacattaaaaatagaatgctattaacaaccagaacacccaagttccctctcaatcactctagcccttgactagcatccactattctgtctttcaaaataccacgttggtttgcttgtcttaaaactatgtaaatagaattatacagtagttttcgtttcatttcttacttccatgaggtgaagtctcaagatctgtacattgttatttcatgtagaaatagtttgttaatttacattactgcatattaatttttatgaattaatatatccattagtgatgaatatttgatatctacgattttatagcttttatgaatattgattttatgaacattcatatgcatgtattgtggtaaacatacatactcatttctttgagtatgtacctagaaagtggaattcctgagtccttcagtatgattttaaagaaattgccagtttttaaaagaggttttaaccaatttttttcttccatcaatactgtatgagtgttccagtggcttcatagcctccttaattttagttttttttttttcattttagtcattctggtggttgtgaaatgatcattcatggtggaggctaatgaatttggctattttttaatatgcatatgaagtattttgctatcttcttcttaaaatgacttattaagtttttttctctttgtcttttgggttgcctgtatttttcctcaatgaatataagagttctttctacaatgtgagtgttgagacttcataggtaatgtataatataaatatgttctcctatttagtggcttgcttttaactcaatggtatcttttcataatcagaagttcttaatcttaatgaaatccactatatctatttgtaattttatgaatagtgatttcgtgtctagtttttaaaattattgcctatctgaaagccaggaaaatattgtcttatatttttctcaaaaatcttgctttatttacttttcacctttaggtgaataacccacttggaactgacatttctttatgtgagttggagtatcatctcattttttttccataagactatccaattaatcctttttatatagctctacagtaccatcttggtcatgaatcaatttgtgatatatgtgtaaatctgttggtggattctattctgcttcattagactatgaatatgccaataccacactgccttgattatttggctttataaacctcaatgtctgagtttcctcaaattttctttcttaacctttctttattagtcttagaattgattattattggccaattgtatttccatgtaaattttataatcaggttatcaatttttacaaaaaacctattggagtttttattaaggtttaattaaaaatgtgaatctgtttttggtgaatggacttctttgcaatgtacatgatatattctatgtttaattattctgcaatttttgaaactaaattacttcatcacattctgaagaggaagtccccataggagtttaaatttcaaattaccttacctaaattagagaccttaaaaatatattgcaaatgaatatacatgagagattgggctttcaggaatcaggactatcatacaagtagaaaggcttttgcattctatttcatagtttatatgagaaatatttggaagctcacataaacatgtaaaattcttttccagttctattgtttagttttattcttatctttgatttaataagtacattaattgtcaatcaaccaccaggattccaaagagatattgagagaagacagaatataggaaaaccattcagctactttccattgtagtgggccctactttttattaaactgtgtaattgaaccgtatatggagacaaaggcaaagttagttatgtcagaatacagagtaatctgtaacacgttaaaaaagaaaaaaggtaactaataaagtttttgaaaactgaaactcctctattcagtccaaatcatagtctcaagatttgaggacaatatttcatgtcaacagattacacaaaagatctctggtatagtagactataaaaaaacagccaagcaagccagttgtaaaaaactggccttttctgaaaactagtatattctctttatctgtttcataatgtatttttaataatattttcattgtacttatttcttgacaaagtctgataatatatgcataaatcatctgttattgaaattgggtattctaattcaacatatcaaccaaaattgcatctttccttttgctaggataaattgggctaaagagatcatttttaggtcaaattttcacttgaaagggaatcaaatgtactttctaattatatttaacattttcttacttactttatttagttcgtcagataaattagatatctgcaggccagctatgaacagacaagaagaacaacgttgctctctttctaaatgatattatttcttttatctcaaccatgaatgtccattgtgaacaataaagcctattattaactgaggaaatattttaagatcgaatacagtaaaatgagcattgttgaatttggacaacataatcatgcaggtaaatgtatgatacctaataatcttattcagtctctgaacttgctcagctatttaggggaacattttatatttctgtatcttaattggcttaccaaaaaggcagattttttcaaaattaggtcttacattaaaaatacacaaatggatttttcttaatgtggtttctgttactaatatacactttaaatattttagataaaaaaaggtctcttccatgctttttggaacaaaatattgggtctcagttatatacttattaaactacttagattaaaatttcttttttgagctgggtgcggtggctcatgcctgtaatcccagcactttgggaggccgaggcgggtggatcacgaggtcaggagaccgagaccatcctggctaacatggtgaaaccccgtcactactaaaaatacaaaaaattagccgggcatggtggcgggcgcctgtagtcccagctactcgggaggttgaggcaggagaatggcgtgaacccgggaggcggagcttgcagtgagccgagatcgcaccactgcagtccagcctgggcaacagagcgagactccgtctcaaaataaaataaaataaaataaaataataaaataaaaaattacttttttgaaaacaaaatacatgttccatactagtaagcatccatgatgcccatatgtctaatgattcttccacatatgggtaagaataaatcacaagattctgaatctccgaaagttcgttttctgacctacttagatcgaaagcacatttagcactttaagcactttttctcaggcctgaaaaatgaacgtatagctataaatcaacacggcatagaggaaatagcagcaaacagggaaccagaggatgtgctgtttggtctagagctgccactcctcacagtagattgtggacacggtgcttaacctccctgaggaggccatgtttgagcggagtattgactgacaaagcggagacagcgaaggtctgtgtaagatgctgaggaactacatcccctgccttctgttcccttcatggctacgtccatgggatgtataggatgtgtagtttttatgcttcattgaattattaatatgctgcttcttttttaaatacacccgttcaattctcagaacatgatattataaataaaagatattggggtcaaatttagagactttgagttattaatcgggttaaaaaacagtacttcaaaattttgtcttactatacactgtatttcttttcttctttttattttgagttctgggatatatgtgcagaacgcgcaggtttgttacataggtataaatgtgccatggtgtgatagtacgacactacaacattttgtttactttaaatgaaagttgtacataagctatccagtgtttgaagaaaattcctatttctatatctcagaaatctcataataaatcttatccttgtacacagcatcatcagtataagggtttgcttacctaaagattcatatatttctttctccttgataatcttgaattctctgaataaccatgaaaatatggcattgagacatttaaggcctgcctctgaaaatatcatcttcttgaggacagaattttttgagaaataatagcttatttaccaaatggaaaattttcacttttattcatcaaacatgtacgttagaaaactattagaagaatgcaaagaagagtgaatagattatgtaattttatttagtgtgcatttgtaaattctatcaatttttaaaaattaattgaaagtgtaaaataacgtaacgatcttaaaatttaggttctcttgtacttaggaaaacctaatgctattccaagtttttaaaacgctaattgaaatttgtggctttttcttttcctccacctaaaaatcccattgaatctgatgacccagcctagatttgcttgtcaagaaactgataatttttaatttttgtgagattaacgagtaatagcagaaaacgtatttatacagttgtatgatgagatataccagcttataaatagttaatttttttattcactaagaaaaatattgttttcctatattcagaatagtggaaatacataatattaaagttataattttaactacattgtaaaaggtacagtaattacatttgccaaaaggtaaaagtggcttcgagaacatttgtgcaattcaagattttcaattctattagctgtattgaaagttctctcaaatcacaaagcagaaattacaaaattggcagaatgactttgattaggtcaagtactttgtagatggggaaagattatagtgataaatccttttgaaatagaacaacctattcagttttactttcaacaagcccttcttacatctcacacgatgatgaactacagaaataaaaaggtaaatgatgttaagacctttgctctcaaaagaaaataacaaaaacaaaacctagagccctttctaaggttaaaatcagctgtctttttacagaattcattttggattttcattctgaagacttccaaccaatagggtagcctttgccagaaattcattatggttgtatacataaatattatttatatgagccaactgtactgtgatcaattttagtaaattatttacatactttcaatgtttatgtttaattgaaatatgccaatgcttttagagtttgttaaattcataaaaatgtatgcatgtatacaagggaacttgactatatcttattaatttaatgaagtttgatataaggcagacgtatttttgacgctagtcaaaaagtgttagttgccgggcgtggtggctcacgcctgtaatcccagcactttgggagaccaaggcgggcagatcacgaggtcaggagatcgagaccatcctggctaaaacggtgaaaccccgtctctactgaaaatacaaaaaattagccaggcgtggtggcgggcgcctgtagtcccagctattcgggaggctgaggcaggagaatggtatgaacccaggaggcggagcttgcagtgagccgagatcgcgccactgcactccagcctggacgacagagcgagactccgtctcaaaaaaaaaaaaaaaaaaaaaaagtgttagttacagaattaataaaactccatatattacatattatattgcacatgtgtatttttaaaaataacttgaagttcctttgaaagcacaattttgttttaaatgcattttggaaaatgcacactgggatgacactccaatcattttaatgaaatttttatttttaaaataaaaaatatgtgttgaatcttgactagatcaatattcactgtataaaaaaaataaattaaagtggctatattatggacccaaataaaaaaggttaatttgaaacagattttgacctgcatattggtaccaccacatgagccaaaagcacaacaccaaggcacagctcactattttatttttttctcaatgtaacaagattttaaaaaataataaaaagatggaaggaactagagtaagagtgggagaatccctttttagtccagtaggatttggtctggcatgcaaaatatttcaattgcttatggtagatagcaattcaaatatttgactataggagttatttacttaaagattgtgaagaaaaaaatgcaaaacccactccaaattttactgatctacagcctggaacttctcacacactttaattttcaaaagaacatatcaaccccacatctcagagtcaacaataggtatctttatcatgaatggcattaaaagggatgatttttttgtgtgtgatctcattatgaactctgtcgtttgaggacagcctcttcatttcttggaatgtataacatgggcaaccagcatttgggatgcatgcactcccaccatctctgttttatatatatatatcttaatcactgcaacattctaattcaggccatgttgatttaaggataaaactagaggctgggcgcggtggctcatacctgtaatccgagcactttgggaggccaaggcgggcggatcacaaggtcaggagatcgagaccatcctggctaacacagtgaaaccccgtctctactaaaaatacaaaaaaaaaattagcctggcgtggtggtgggcacctatggtcccagctactccaaaggctgaggcaggagaatggcatgaacccgggaggcagagctggaagtgagccaagatcacgccactgcactccagcctgggtgacagagactccatctcaaaaaaaaaaaaataaaaataaaacctagaattatatataccctatatggaaatgtagtgggttttgaaagattccaataataagtacaaatatggaattatctatagaaaaacaaatgctgaatgcaatactatgttaatagtagttattcattgatatggtttgcatttgtgtcatcccccaaatctcatgtcagattgtaatccccagtgttggaggagaagcctggtgggaggtgattggattatgggggtggatttccctcttgctgttctcatgatagcgagtaagttcttgggagatctggttggtaaactcccctcttctctctctcttcctcctgctctggccatgtaagacgtgcctgcttctcctttgccttctgccatggttgtgagtttcctgaggcctctccagccgtgcttcctgtagagcttgtgaaaccatgagttaactaaacctcttttcttcatgaattactcagtctcaggtagttcttcataacagtgcaagaatggactaatacattcattataaaggaaatatccaagagccaaatggaagcagactaccaagtaaactgaggtggcaggtttgtgatagcaaccaaaaaaaaaaataacccaacaacctatagtaaccaagctttccatggagaaatggagaacgaataacactgaaatatgtgtgtgctgaacactggtctttgccacttctattggttgacaggacagatcaccccaactctttctgtatattgctctttataagccttcacaacaacaaaagtctgaacacgctcataatataaactagtctgggatttccatgagctaaagatttgaaagattattaaatatagctgtgcttttatttatgagcagctcttgaccctctttttcccctaccatccaaaacctctaataggaaaaagaaaattacatatttcatgtcatgttttcatttacagataacaatcactagatttgccccaagaatatacatctagcttgcattttcgtgatttataaaagcctcatggattttttttttgactagagctatgtcactgatattaaaattggcagtcttaaagggatttcttttatttgacaaaacatattgtgctcaaggttaataatacatttcagcaatgtacatagtgctcttggcagacatgtgctccgtttcatcattttgataggcagatccttcatcatttgataggcagattcttcttcataataagtaaaatcctgccaaaagttaatgctctgaattgctttaaaattcattttaatgtaaatttggatagaacactcctttcttgctatcagactagcaagtcagtgtaagaaaactggttggccggaaaggaagttggtaattttaataggaaactcattacaaaacagtaagtgggataaaatcgcacttccatgtttgttgggaaaatctgaaaagttttgttgcttatggggagagagaaaaaagactactgagaagattatgtctaaaaccaaattccaagccaccttttatcaataaaaacataatactaaatgttgatatttttagcaaaagataacaaagtacaagtattgagattctggaaggacatcacgcaaatgttgttgaaacatatatggattaaaataatcttactgtgctctgttactggagttcattataaatatggtctctaaaagtaatgtttaggttaacccacagttaaaacaatgtataattccaacattttttctctcattaaaaagaaaatttaaattgccctactttgcaaaggttataagagtctcattttgtttggcatcaaaaactgcaagaaaagtctactacaaactaacaaatatttattgggcctttgtgatgtgccagcttcagccagttatgggaaaacagattcaaatatgtttcttgctattatgggtcttaaagtgtacctggagagtaagtcaatgaaagtaggatagcacttcctgctataattgtttgtgtgaatgttttgcataaatttgggggtataggcataaaggaactgacgatagtgactttttcagaaaatttctctataggcagtgtgattcatgaacaatacatagggattatctataccattttaaaaatagaaaggaaggctttttgtttggaatgaccaatagatttgaaataatattacccttaggattatgacaattaaggccatctcacaagcctagagcaaatactaccattggaaataagatggaggaagcaagtaaaaactagatgatgaaataactttggtgcaaagctaattactgtgcaaattattataaatattatagagaatcattaaaagattataatgtcaataaagttttggtcattcttgatgtgccgatttcttcagtggtatattattaaaaggggagacagctgaaatgcttggggcccacaacaaagaaacacatttggatagacagaatggaaaaatttatcacaatggttttccatctctctgtccccctcccaacaccccgctcactagtgagagttacttaagaaagaatacaaaacttgttaatttctaagtatcagaaatagagaagataatcaataacattacaaaaaaatagtttgtagccttaaaactgccatgttttaagtttcataataactgtttcctagtattagccaaagatgtgactaaattgataaaatattaagtaagtataaaaatacttgaaaaggcaaataattatacacacctaaattaaaaacattgagtaagaactaagagatcctgcagaaactgatctgttttggccttataaactctacatatattcttttaagaggagttaaacttccttttgtaaaccctggacaggacatgtgtactatcgcaatgttgtatgcagattagaacatgctgtcaggccttgagttaattgagttgcaacttcccagggaagttgaacctgtcactctgactccaccaacttatctagtgatgcctaacaactcagggctaacaggacaccctggctgaagagttagtgcagtttcctaaagtgtttacacttggtttctcactggaaaatctggctcatcacacatccagaatgtatgaagcaatttagatctacagacaatagccagatgggctgccttgaagaaaaaaagtctcttgtttacagataaagtaaggagagaaatgccgcctaaggccaagtgcccaaaaactgcctgggcaagcttcagggggctaaattcccaaactcaacctgctgtctccagagggtaaatttttgtattggaatgtattatagagttcatgataattgtttgtattctattgaagcaacaactcattttgcatggattaggaagccctttacagagatatgccatgagggaaaaaattgcctttgatataacaaataagcagaattaaccttgaaatgaagattataatacattacagtgctatgtagaaaatatcagagaagtcagaagtaactctgtgtaaagagtaaaaaccttgacaagactaattctttttcatttttttttcctagaatagagatttgtttttatttttcactttaaatgatgtaagtatgaaaataaatctcatttttatatacttaaaatcatacactttatgtcattgaaatgagacaggtacataacaaggtatcttactcttgtttgtttagaaaaaagaaaaacaatagcatcttacaagagcagggataaaataataaatgtcctagatgatgacttggatttgaaaaatattcaaattttatctcgtttcctatataaatctttgaacgtactgctccatatcgaattctacattggtttcttctctttccattttaatgagtcttttctagaaagtcaagatctcttgagtttggggaaatgtaatcaactcaaaactgttcaacagcacagaactttgcaatgtttatggagtgaaagcacagcctgctgcgatgagttatgtctgtaaaaaaaaaaattaaactttgataatccataagtcctagcctgggggggtacaagcatatgtttatgtgtgtgtgtgtgtgtgtgtgtgtgtgtgtgtgtgtatttttacatatacaaatatgtctgttaaaaagtggcctgtatatccaaagtgtaagctaggtataaacctttggggtctataaatagtatctggtaatgtgttacaaaatgtaagatatcactattatgaacttttcttttttcgggaagaaactgtctacatctgagttgagtctgtgaaattagtcattgtaaaagcaactagttaaaaaggcatttacctttaattattttatttaaatttcaacccatgactagtaaagcaatgaagaaaaggtattttaaagttaagaatacttctatctttataaagaagtagatactattccaatctcattaggaaaaataatctgcacgcctagagaagccttaatcagcatgtattgagcatcaactaagtgcaacatttctgttaagacactgttaaggatcaacgaagaaataaaacagtatctccaagaaagttgactctatactttccctgagcattagagtcaactggaaagtctttcagaataccaatttacgttatcagtctaatgattctaaatcagaatcatgtgggtgtggaagtcaggaatcagattccccaactgatggaggtacaacccagctagaaaaatgctatattggagaggttcttcccaaataccagtgttcataagaatcacttgggaatcttgataaaatacgttttcttatggagtaggtgtggcttccacacagaaattctgtgagaagctacatcctcaatcagctctacatgttgacgtgaagctgtaatttaaaatttagaggacagaagaaaccataaagtaaccaagttaatttaaagtgattccagactaatagtgcactaatgtctggcagatgaaatataccttccctctgtaggaatccaccactattttggcacttgaataattcccacaaataaattgttaaataaaacaaagacttcaggaataacactcttttaaagtagtgatctcctttgctgaagtaggaataaactgagctttattctatgaacagatcgttttgatggtttttggggggaggaatatttaaaaacctaaactaaaaatctgaactgaaaaaatgacattggaaactgttcatagtaaatgttaagtaaaaaaaagaaggctacaaaattgtatatatatatatatatatatatatggtgcagtcccatttgcttaaaaatatgtatatataaaaaagaggtaagagctaaaaattcacacaccaaatgttaacttgtctccaggataaataagcatgtactacttttaatcagagacaaaaaccagtgtgttttcaaaaagtggagagctaagtctctgttctaacttcttgctatcattgttgacaatatgttcatattaattcagcaccatttatggcctcttagccaagcatatcctgtttgtgacagtataagtcattgtaatggaaaagattatgatgcactggcctgatctaagacttcactgcattcatcagccacaggagacaaagacatgcacttttttcataatttttttagtaataattgactattagagaaaatgaatggcacataataattacgggcagacaagatggtcagcaaatcaaactgggaaatgcagtctcagttttattaatgcggtgatttcagaacattacaaagatattattgttttgttctcagtctactcctgaaatcactgtttttaccagaagtttcaaaattctttgctgaccgcagtgacccccaatgtgtttttaattcaagaatccagtaatcccacatcaaggatttggtgctgaacattttatgtttaataatattcagggtcattttgaactcctccctgtgcacatagccagtaataatgcacggtgatattgcagtaacatttcttgcctctgactagctgcctgctgcccaggcataaaatcttaaaagttttattttccattaaacttgaaatatcaaaaaaaggagtcaggacagaaacatattgacacataaaagacatgaaattgcataggccaccagaggtttttaggaaaactgtggatgttggaaaaggtcttttagagcctacacctaaagcctttcctctgattcagtgtcataggcaaagagtgcttttgcaatttcatggataaaggctcaagcagagagaattcagatgtagatcctgaggcacatgtgcctgggtttctctactttttttttgaatgatgttaaaccaaaaataaggaatttattacacaggcaaaaactagaatgacaattagttccattgccagatttacaacaccaatctgtgcattttgaagaaggctaacaaaaataaaataaatcttatactaaattgttggctttgagaaaacgaaaaatgggaatgaccctactgcagtcactaaacacagtaggatagatggttctcttgggaaatattcttatagattatataaacagaaaggactttgaagaaaaagatcaacctacattaataagctaaaatttaaaaattgagcgagcaatggaggtgctcaaaggtagaatcagtagcctgatttcttgtttcacccttaaactcacaaaaagacatctctctaaataataaaggacaatatttcaaaattattgctgatagaggtagacaaagcttaccattacatagtctttctatgtattctaaatttgtggtgagctctgagactgattctattttcctacttacacttccagctcagaaaagacaaaagatttctaaagacaagtgaacatgttgttcaaagttcaaacctaggccataatttatctcaaggaaacattttttttctcttgagaccatatagactataagttttccaggcctgataaccaagagaaaatttggagtattctgggatcttactaaaacctgcaggcaatgaggtcctagggttttctgaaatatccatagcacccatgacagccaagtagtcagatacttaatgaaactgtaatacaagttgtgatagaataagcatggtctccattctttctgaaggaagctaccttgcacttggttttctcccctggctagcttcctattggtcactttcgtgtgttcatgcagtcaagaatagcttatccaccatcacaaaaatcaatgtaaaagtctgaacctagctcactcttggaccccagagagaaaaataattttcttccacttcaatttagtcctgcctcagtgagccctctgatactgcctcagaattaaatcttcccagcttatatgtttgagaaaattctaaacactccacaacctcaaagctcagtcaagataacaatataatagttcagcacttcctttcttgaagtcagtattaggtactattttttaaatctcaggtcattcatttatttgcccagacttccctttattatagaccaaaaaagatgtttaagcatgatttgcaaaaatttccatccaaatgccacctctctaaatatctgcttatggaattatacaatttaaacattcgaagttttacagaaacaggaaagactatctccagcattataataaaagtatttatttatttattcatttttttaattgtgtgggtacaagtaggtgcatatatttatgtggtacaagggatgttttgatacaggcatgcaatgtgaaatgagcacatcataaagaatggcagtatccatcccctcaagcatttttcctttgagttacaaacagcccaattacactgaagttattttaaaatattcaattaaatatacaattaagttataattgactatatagtcaaccttttgtgctatcaaatagtaggtcttatgcatttcttctaattttttttcctataaagggaatttttttcccttaaagctgcagctgtcaagttttatataaaatttgttagtggatatggttagaaatggattttgaggctgtgcgtggttgctcatgcctataatcctagcactttgggaggccgaggtgggcagatttcctggactcaggagtttgagaccagcctgggcaacatggtgaaaccccgtctttactaaaaaatacaaaaaattagccaggcgtgtcggcgtgcgcctgtcatcccagctactcagaaggctgaggcaggataattccttgaaccctggaggtggaggttgcagtgagccaagatcgtgccactgcactccagcctgagcaacagagcaagactccatcaccattaaaaaagaagaagaaatggattttgacatccccccaacaaattgatttgttagactaccatatacacagctaggcattaaccagaaggatgacaagaggaagaaactgatgatgataggagaagaatatcttatcaggggaaggggaacctgtggaggatttggaaagagagaagcagagaaacataataagcaggttttttaaaatttacacatatatatgtgtatatatatattttttttctttcttattttttctttctgagtttagattttgcaagttagggggtgcattgatattaataattataactcttttacaattctgaggaaaatgtcaacgtcagaccgtgctgtccatgcctagaacatgggccagtcaaatggatgatgcaaattgagacccaaagagtgcaagcgtgaaatctatgagtacatgaagacaccttgccatggcttcagggaacccatctcagatgggtactgtgtgagagttggtggatctcctgagtggaccactattttaggttgagttagacaataaacaggtgctactgggggacagtagcatcagcaagttggttggagaacacagcagaaattcaggatctgcttctgtcagggcagatgaagccaaatcagtaagcaaaagttgccaggttttgaatcaactggaaaagacaacttaaattatgagttcagtcaaacatggatttcagcttgcactgagtattacagacccagtgaacgaggcaaagacattttgcagagccaggggccctctctttgccaagcacccaacacttatgtgaaggagagaagcaggtgcaagtgttagagagggatatgtagctgagagtctggatactttaatgaaacaaagccttatatacaaagactgtttaaattagtatctgtgataaatgtcactaatgaaaacagggcgtttccatctccattctggttatgcagcagcatgctggaatccaattaaccatccaattgtagtttctgaagaaatcgacataacaggttataacaagttgaaaatgctattttctccacatatcagagttgtcatgaacaaattttgacacccctctctacaagctttcattattgttgctttttccacctcttacaatgaaaaaaactctacataatttaatttaaatgctttctctaatttagtagtaggttgccagcatttaagtaatgcctaagatacaataggtacaaaattatcattgttaactaaggtaatcaatatttattgaagatttttgctccttctcttgtgagtaactcttttctagcatatgaaccttgaaaatcaaccaggaaaagaatatttccactaaaactaaacacagaaatggaatacacataaggacacatacgtctcaaaataaggtttgacaaaataaatatcaatggacaaaaattcacaaataatttctaaatttacgctctctataaatactaataaatgagaaaaatttcaggcactgataaaacaggaaaaaatgggtactttttaaaaaatataatttggacttttattttagattcaaggaatacatgtgcaggtttgttaatatgggtatattgcataacactgagttttggaggcacaaataatcctgtcacccacatagtgagcatagtatccaataggtagtttttcagctcttgtcctccttcatctattccctgtttagtagttctcagtgtctattgttctcatctttatgtctatggatacccaaggctaactttcaacttataagtgcctccaaaactcagtgtcgtgtaatagacccatattaacaaacctgcacatgtactccttgaaacatccacttataagtgaggttagcattgggtagccgtagacataaagatgagaacatggtgtatttgatttcctgttcctgtgtcaagtcacttggaataatagcctccagctgcatccaagttgctgctgcaaaggacgtggtttcattcttttttatggctgcagagtattccgtgatgtgtatttgccatattttctttatccatccataacacatgttatttttaaatctcaaacagcttacaatctgcatagtgtacaatatatatgagtaaacacttgtgtaagtattgataattatcattcacagattatttaatacgtgtcttacattgttcaggacattcatacatatttcctcatttaattattaatatgctgtgatttattattattactcctactttttagatagaagcactcaacagttgagagccaaataatctgctaatattacagagtgtagaaatttcacacctggtactcaaacccaggccatcagacctcaatgcccttcctcttaaagtctaccccaggaaatcaaagagaaaactgaaaattggccaggagctagagggaatattacatacagtgcaacactgtcatacggctgacttcttagaagtaatggagactaaaatttaacaaaataacatatttagagttctaaaagattattttgtaatctgtcaacccagaactatctatctagtgggacaatcctttcaaatgaagctaaaacaaaagcattttcaaacaaaaatgcctcagagattttgcactcaacagacaggaactacaaaaaatggtcaatgagaatcttcagaaagaagggaaatgatatatgatagaatgcagatcttccagaaaaaaaagattgctaggaaactgaaaattgaggctgcctatacattaccttgtaattatttttatgaatgattttatgtgtgtgtatataaaaatgaagatgtattaaaagatgaagagaaagaatttaaaatgaatacaaaataggtgaaaccaatacaatatttgtgtatgttagatacgtattcaaatatgccaatatttgtattaaaattaaatattaaaataggtttaaaatatatgggggagaataaaaaacgtaaattatgctcataaaagataccagaagcaattttggaaaaggtaaattgaaagacccctaaaaggtataattgtttcaattatagcttccttgggattatcaaggcagtgctatattgaaatgtatataaggaaaaaggagctaggaattatagattgttttttcaaataatagctttttagaatttttagtggagagaatagaaataacataatagttcaaggagataatatggtcaaaatagaacattttataaagtaaaattcctgaatgattttatatgtacgtttattttttttaaagtctgtccacagtgtctcatgcctgtaatcccagcactttgagatggtatagatgggagcatcacttaagcccaagagtttgagaccagcctgggcaacatggagagaccctgtctctacaaaaaataaacattatctgagggtggtgacacacacctgtagtcccagctacttgagaggctgagagagaagagtcctttgagtcccagagttcaaggctgacatggctataatcaagctactgtactccagcctgggtgacagagcaaggcaatgtcttaaaaaagaaaaaaaaaaaaatattggaaaatgagtaattggatatacaaatatggaagtagtaagaattgttgaaataaatggttaaagaatacaagattctttataatgaaaaccatgtgtagaagagatttaatttgcccatagttgaaataatatttgtctttatgatagcagcataaagacagataaaaaataatatccatttggatgtggaagagaggaatttggggaggtttgatactaagtcatgagatattgggtcatctgctgagaagtttcaagcaggggcaaaagggaaactccttgaggttatgagagggatccgtttagaagtactattttgacatgggagcagcagctatgtgtgtaatatatataagtatttcattttcaatatgtttaaatatgctcaaacaattctttgaaacaattacaattgaaccctactaggccaggctccagcctgtaatcccagaactttggaaggccgtggcaggtggatcacctgagctcaggagttcatgaccagcctgggcaacatggtgaaaccccctaaatcctgtctctacaaaaagtaaaaaattagttgggcatggtgttgtgcgcctgtagtcccagctactgggaaggctgaggtgggaggatcgcttgagcgcgggaggtcaaggcctcagtggaccgtgattgtaacactgcactcaaacgtgggcaacagagtgagaccctgtcttataaaaaaacaataacaacaactacaacaaaacacagttaaaccttacttgaagaaaaaggaaaatggagcatagaaaggttgaatggtttacataagttaactagaaaataagtagtagagtcaaggttttgaactcaagactcaacgttgggagagcgagaatacagggtctctctctgagtcataggcttttacccagactttcttttaaaccaggctgctgggtgagaaagcaccatctactggtgttttgggcagactaagtattccttgtgccagatcgtttcatgccttgcagaatgtgtaacatcctactatatttcagaaccaccctcttactcactgtgaaaaagagaacattttctaaattctctccttttggtgatattgccacaggcagaaaattattccaaatgtttctatagcccagggccctctgccctcaggtgcattcctgaaggcagaggaagaaacaagccccactgaacccaaacttcttaatttaccctactctcattcacatatttctttttcatatcttctgctctcttgaggcggcttttacattcttccccagaatgtaattacagagcatgccagagaaaacaaccaataaagggactgaaaaatattatccatatggatacaggtctgtcaaatcattggtcatccaattaaaagataatctcccctacaagagtctggaaacatgtatgcctccattcaattcttattattacaagttgtaccaagtataggcaaaattacaaatgctaaatatatgtaaggcaagaatgtattgcacattccgtgacatgctgcctgattttcatacgattccatgaaatactctattttgagctttatattttcttagtagctgccttttaaacatctgtccttgtagttcatactgaaggttttaaattgaggaactagtaacacagtaattggggacaaaacgacaacatttcctacatggaggataaaatagaattcctggttccctgtgcaatacaatttgatatccattccactcaacacacgcagacatatacaggccatacaaattgatacactcaccctttggccagagaaaatcagcgttaatattgtccatttcaccgctgttcaacatgcacgacagacgaatttttgggtgtcattgttattcaccagattgtttctattagatgttactttgcgtatctatagtgcctaagaaaccacaaaaataggacctcctaggagaaggttggtgcaaaaggaattgcagtttttgccactatttttaatggtggaaaccgcaactgctttgcatcaacctagtaacaaccattgtaatatgttggcgattttatggaccagaaatctgtgcaaaccaccacagagaggactcagctcggttccacaatgactgagcttaggtggttcaaacaagtggaaatgactgtcatggcttactgaggaccatagatatgaagtcttagttttggctgtttgttgatccaaaatgtcttcttcaatcacatgtctgacatctgggctaggctagctggacaagtggaggttgactgggcaactttttgtctttgaacggtacaagtctcaaggttgttggactctttacatcatgacaaggttctcccagcagcagcattccaagaggcttgggtagaagctccaaggcttctggtttttttgtttgtttgtttttgtttgtttgttttttgtttgtttttgagacggagtcttgctcagtcgcccaggctggagtgcagtggcacgatctcggctcactgcaagctctgcctcctgggttcacgccattctcctgcctcagcctcctaagtagctgggaccataggtgcccgccaccacgcccggctaatttttgtatttttagtagagacggggtttcaccatattggccaggacggtctcgatctcctgacctccagatccacccaccttggcctcccaaagtgctgggataacaggcgtgagccactgtgcccagcctacaaggcttcttataaagtagctttggaaatctcagaatgtccttttccacaaattcaattaatcaagtaaacaaggcaaacccagattcaaagggagtagaattagactccacctcttaatgggagaagtagcaataatttgaggccatctgtaacatccgtggcagactctgatatgttttactggctcagaacacacagtgttgaagaaaagtataatcagcttgattacacagctgtcatagtttaattcatgcaaatcatactaaaatacttccacaggttggttccttttctgtccctgattctaccctgggttttgtgttatcaaatgactcacatcagccaacaattaaaatttttcccctcctctcacttctcactattaaacaggttttatctcatgtaaaactgttagtcaaatgtaattcatttttattgtaactttatacccagggttttataggcactatgtctttgaaactattagtagacatatatgattttcctgaattcccatcaaacgctgtttctatatcatatctttttttttcttaataagatggaggagatacataaggtctcaatgaaaatgacaaaatttaggaggctgtaggaaaataaaagcaaacacagaagcaggagaaaaagaatgaaataaataaaggagtgatgttgggtgttatgttccgtcattacttgtcaatttaactaactggctcaaaaagcattattttaatatcaactaattaaatgtattctgtgtatagtactcagttgctctaatttttgaaatgcatagagacaaaatttttgagaaactatattttacaattttaacagattataaaatacaagctcttttaaacattaccatgagattacctgctttttaaaatcataaaatttcttaatttaaattcctctgggtggaatttaatgtattaacagccaactgatggaaggagaaaagaaagggagcaaaggcagtgcaacatattttccatttcaatttaagaaaagttttacttagagttgttatcaagataatactccacagacttgttaaacaattatggcaaaacaatttgagtagcagaagtgtatccaggatactgcaaaacaaattatatggctttcctattgagaatatattaataggtttagaagtggtaagctctagatatattgaggcaaaaagaaaaaaatcatgataatgatattcatcctcacgtactttattatttcattttgtagagatcaaaatgaatacatataactaagctttattttatgagtatttcttactttaccaattgataactgtcaaaattatgtaattcaatatttagttagtctataagctttctggtagttttttcataggaaattcagtactgatatgctcttggtccatttaatccagattttatcatataaaggtaaaaaaatcagagaatatatgaaaaacaatacttatttgataaattgtctttctcaccagtagaacaaaatgcatttgattcataaacatggaaaggaatacagatataagcaaatatgcatacacacatatccatagttacataactagatagaaatgattatatatctcgcaatttttaagtgatgagaaaagccctattataatgtgcccaacagttgagattgttgtttcgctttttctactgtgaaataaaagacagatatttttcagcataatacaactcttccatttacttaacaattttcagttattagaagcagatggtgttttggtggtaaacacaattaatttacattttagagaatttacttaattagaattggactccatgtctcgcatacattggatttcatcattatacatactgtttataattctgccggctgtcataaatgtacacttattttttcaattcataaaaatataacttctaaaaaggagataatctatccattttcctgcataacctgaaaataaaatacattgtttcaaaatttcattttaaaagatgtttgagccatcaatttatcttgttttaaagtgcgtgaagaagtcaaagtatgtacaactttaagtacatatctccattttatatctcttcaatgttaatgtatttttttagttctaaaatgttaactgaagtatttcatactttatagatctataaaaatactattgatgacaaaaacatgcttattgaaccatgaaaacatttccaatttattcagtttatttccccaaaatgttaccaaagtatatttatatagtctgatgataagtaaacactctacccaatttcagatgttggttctgtaaaatgttattcattgaaatgactgatgttttacacttttttttcttttttgagactgagtctcactctgttgccctggctggagtgcagtggcatgatctcagcttactgcaacctccgcctcctggatacaagtgatttctcctgcctcagtctcccaagtagctgggattacaggagtgcaacaccacgcccagttaatttttgtgtttttagtagagacggggtttcaccatgttggccaggagggtctgaaactcctgactttaggtgatccgcctgcctcgacctcccaaagtgctgggattacaggtgtgagccaccacgcccaaccgatatttcacacttcggatgtgcatgcatgtatgtgcatgctcatgcatgtgtctcctcccaattacatttggtattctaattttatattgctggattaaatatatcatagaggtattaattcaagttatttaaattttaatatttatgaaaaatgctccttcttactatttcagactttattttacttgtgccatagatttattctttagaataaatcatttatgatgtaattatttaaaataaatcatttatgatttaattatttaaaataaatcataaataaataaatcattctttagaataaatctataacatttattttataactttctcagggttataagatcccttttacctgtcatgcaacatcagcaaagggttattttaatactttgagcatattattattttgcttcatggaaatgcaattaatagtttttcttgaataatttcctttaataatgatctctacttagcaaaacaggctatggttaagagtatgtccctaaaagtaatttttaagagggatgatcttgttttgttgcccaggctggaattgaactcctgggctcaagcaatcctcccacctcagcaccccaagtagttgggactacaagcaattgtcactgtgccccaaagagttatgtatttttaatctaattagaataaaattctaaagaatattttgaatttgtttaaaacagcttaaacttaatatgttcttagaaactgttcttaacaagtttgggggcttaggattagatttgattattacttatcttacatctaaaaaattaattctacatcatcattaaaaatgatgtccagatattacgaatgataatttagggtccaaaagtaatagttaagtggtctgacaacttcccttaatagtaagatgttataatcaataggcttatattttacatcttgttagcaggttttattgaaataccaataaagcatcagtaaaaattaattgtctttgtcggtgattatttacttgactctgttgttaatatttcagacatcagctttacatttttacccccatttaatggaaagcttttttattttcagaaaaaaatatggcatctatctttccactgactattagggaagctatcaagtaaatatatttaaggtaataattagtaataaactttttttacctactgcatgaagtattttagatttgggagaaagagtgtttagatatctatttcagtattcagctccagctcactctacctctaatattgttaaactatttatcttctcggatttatcatttatctatcctggtatcactaagcagtcaaattgcaaatctataaggacttgaattttgaaaagtgccaccatagctttgtcaatctaaaatgtagaatgcatgtaccagactgtacacatacccaaggaagacccaggaaagagaaaggcaccaggcactgacttctggctgcaaaagtaggaagtaaaatctaaggctgtattgtaaagtgtctacagtttgaatgcgtgtcttcttggtccccttgtcaaagggtgaagaacatatcatcaaggcatttaaagaaatctggccaatcatcagccagctaatatatcatacttcccagatgggaatgcaaggatggtaaactaaaaaaaaaaaaaaaaatactttaagaagagtagcagagatctcaatgatcacacaatacagagaatacacattattccagaaaagttgttaaacaaacactcagcaaccaggacaaaaataaactctgaggatggaggaataaataatggttgttgcaatacattatttaaaattgacaatgtctagtttttaaaaataaattatgtagtatgcaaataaataggaaattgtgtaaatctgcagggagaaaagcagataattgacagtttctctatggaaagttccccagattttggagttaacagtcaaataatttaaatcaccaatataaatgtgtttaaagaataaaggaaaacatttaaaaaatgaaaaaataaaagaaagtatggaagtgtttctatcaccaagtggggaatatcaataaacagaaattacaaaaatgagccaaataaaaattgtacaatagttaatttaaaaaatgagtgatcactagaggaactcaatggcagatttgagctagaagaaagaatcagtaaacataaaattagatcaatagaatttatcctggctgaggagcagaaagaaagtgatgaaacataaatacagcctcacagaactgtgggacatattgactgtaccaatatatgcataaggagaatcccagaaggtgaagaggaaggcgtacagattgtgatggaaaactacctatatttgatatgaaatataaacctacatattcaagaaattcagtgtgttccaaggaggataaaaacaaatagatctactcatactccccatgctcaaatttttaaagacaaagacaagaacatttttaagacagcaagactaaaattactcacgaatatgagagaactccagtaagactgtgaactgatttttcttgagaaaccgtaggacaaaatacaatggaatgatactttcaaaatattgaataaaaataatgtcaagccaacatttaggatacaactaaattcttcttcttcgaaaaaatgaaggatatattaaaacgttttcagatacacaaaaatggagaaaatgtgttgccaagagacttttcatacaagaaatagacaagggagttctttttttaattttagatggaatcttgatctgttgcccaggctggagtgcagtggagcaatctcagctcactgccacctctgcctccaggtataagtgattcccctgcctcagtctcccaagtagctggggttacaggtgcccaccaccacccccggctaatttttgtatttttagtagagacagggtttcaccatattgctcaggttggtctcaaactcctgaccttatatgatccacccgcctcaggcttccaaagtgctgggattactggcataagccaccactcctggctagacaagggagttcttttggctgcaataaaagtaaaccagacagtaactcaagtccatgtggataaataaagagcatcaataaagccatcttcataggtattaaaaaagacaatacaaatattttctagtgtaactacttcttctctacattgtaaatacaactgcatgagcaattattataaaagtttattgataggcttataatgtttacagatggattttatctgacaataacagtgcaaaggatgaagagtccaacacaagaccacaccagaatacacatttatctaagtgtatacggaatgttctgtaggatagactttgtgtttgagtataacattagcttcaataaattaaaaaagagtgtattctatgatcatagtggaattaagctggaaaacagcaaggggaaggaatttagtaaactcacagataagtgaaactaaacagttaactcctaagtaaccaatagatcaaagaagaaatcacaagggacattagagaatactttgagataagtgaaaataaaaacacaacatgaaattcaaaaacaaaataaaataaaaactaaatataaagggatttagctaaaacaatgcttagagggaaatgtgtagcagtaaattccactgttaaaaaagaaaaacaatctgaaatcaataaccttgtgtttcaccgggaaaaagatagggcaagaaaatcagcgcaggtataaggaagaaaataaaaattttattaaataataaaataaatgaaatacagaaaagaaacataatagaaaaaaatcaacaaaactaaagttgttggaagatcaacaaaattaatgaatatctaggaaaactgatcaagaaaaaagaaagattcaaatttataaaatcatacatgaaaaagaaaacattattattggccatatagaaataaaaatggttacatggaaatattatgaacaattgagtatcagaaaattagataactagatgaaatggataaggcctggacacaaaatattaaaagtaacttaaagaaatacaaaatctgaaaatagctttaaaaagtaaagacattaaattagtaatcaaaaacttctcacaaaaaaaaacaggaaaagagagaattctaccaaacatttcaagaaaattaacagcaaactttctcaaactatttcaaaccatatagaaggaagaaacgttttctaagtgtgtcaggccagtatcactctgatacacaaatgcaacaagcacatcaaaagaaaacaaaaatgtcaactgatattgttatagaaataagacttgggcatatgttgcttttttaaagccagttgggaccattagttaattcaaaatccactggcaacaaattcaagtttttacctgtccagttgctttacatataacctcaataagcagatttttacccatttagagtctatctgttttgcacactccaaaaaactacaccccaaatctgctatccatagataagaaaacccctgaggccataaaagaccaggagcgctgctgctcttaggagttctctgactcagagactcccatcatgctgatccatgtcatcactttaacatgtaaggccctgcctgttcccttgtctctgaggtacgttttccttcttctccttcccagtggtggccttgcacttttgtgtctgaaaggactcatgctgtgagggacttaccctccaaggcaagccagtcaaaagtaccatccaaggaaaaattgtgtgctactgcctccttgtgatcttatccatttccttgatcagccctgaaatctcaaactccctgtacttaagtatatagatgcaaaagttcctaatgaaatattaataaaccaattttatcaatatattgaaagacttataccctatgaatacatgggttttatctccagaatacatgagaggttcaactttttttaaaaaaaataaatacatgtaatacaccagtttaataaaataaaggatagaaatgctttatcatttcaattgaagtagaaataacatttgaaaaatccagcacattttcattaaaaagaaaaaaaaacactcaacaaactagaaatagaatgacacttcctcagtccagggtcatataaaaaatcgcacacctaacatcataatcaattgtaaaagactcaaaactctctccctaaaatcagggagagaacaaggatgtctgctcttgccatttgttttcaaatttgcattggtggttctagccaggaaaattaagcaagacaaacaaataaaattcattaaggtagaagcaaatatgtaaaactatctttatttgcagattacatgatcttgtatgtagaaaaaccctagggaattcataaaacaatgctaataaacaagtttatcacaattataggatacaacattataatacaaaatcagttggacttcattataatttacaaatatcgtacttctaaaaacacttggaaagtgaaaagactactcaagtaatagaagacttttttttgcaaatggtatgccggatcaagagtctactatctagattatgtatggaactccgacaacttaacaataaaaatgacaaatgaactaagtatacaaatgaattaattatttgaataaatatttcaccaaagaatatataaccatgaccaataaatacattaaaaaatcatttatccttatggatattcaaataaaaattccaagagaataccacttctcatacactaatatggctatcagcaaaaaaaaacaggcaataacaagtaatgacaaggatatagagaaatatgaatccttacgtattgctgatagaaaggtcaatggcgcaggacttcagaagacactttggcagttcctcaaatagaattatttgaatttatttaaattacttgaacataaaattaccatatgacccagcaatatcacacttaggtgtatgtattgaagataattttaaaaatatgtttacaaaaaattgtatacaaatgttcaaagtagcactatttagccaaaatgtaaaaaaaaaaaaaaacaaacccaaaggtatattaagtgatgaatagataaaaggtattttcgtccaatggaatattatctggaataacagtaatcatgggtacatatgaaaacatagaaaacatagatgaatcttgaagacattacactaaacaatagaagtcatactcagaagactaaatatgtatcaattgctttgtatgaaatgttctgaatggggaaattcatagagatagaaagtaggttcgtggaattcgggactgggtttggagaaggtgataacaagaatgagcattgattgctaatgagtactccgtttcttttatgagtgataagaacttttaaaaattatagtgatgattgcacaatcttgtgaatatactaaagtacattgaactgtataatttaaatgggtgaattgaattacgtatgcattatataaaactgtgaaaataaatcttcatgtttaaaataagattacttcaagcatttaaattctatgattaggggctcttttcaacaaggagtctttttgtaaaacatatatacaattcaaaaatataaagatatcaaataattcaactaataaatcaaacctaaccctatcaaccaaaaacttcaactattaaatgtttactttttctatgcccttagtggtctctatagccaaattgcctagaattgaatcctaactcactatttatcttttgtgttactttggttaatgtatttaacctctctgcgcctaagtttccttttgttaactcagaaggttctagtgaagactaaataactcaatttccgtaaagtgagtatagcaatacctggcatgtaataaaagccacataactgtcaatgttataacaataacacatacaagcacacacacacacaaatgtctttgcacatataaatgttaacatgtgtgttgacacttagtacataattgatattattataatcactttgactgtaagaataacctaattaagatttacaaaattgatgtctttgaacttttttcacttaaatgtacattaagattgaacataaatttatatggttttatgtgacaatcattgcttattaaaattctagcacatagaactttatgcagaaacaataaaagaatataaaggaagaatatatgtaagtttgaaaaccaaagggtagactaaatagaatagttcgtgaggtgtttaataataatgtttcttgaaaaatattccttgtaaaaatatattaataagcttttcagtctaattgcacaagtgttgatttttaaatgaataacaatttgtaatgttagctgatcttattttttataagcctatgtctccagcaaatcagaaaattttgaatctaaggaattttatatagcaaagtagtatccattacacttgggattgaaaatatctttccaaatcattaatagctttaatatccaaagaactacgatactgcctcaggaaaaaaatatcaaaatttctgtggccatttacacattttcttttctgtttttatatgtacagaacactgaaggctgagagataagaaataagagaaaaataataaaatagacaaacaaagagataaaaatttattaaaacttaaaatatatatgagtcgactaactaaaagaaaaattatttatgtcctttcaaggtatggactctgtctattgcattgttttcactgttttatatatatcaaataaaattgcagtgtttttatgtgtgtgtctgggtgtgtgtttatgtgttaatgaacaaacaaaggaaaaattatctaaattataagccattttaactatatgattctgaacttattaaatagtgtatttttgaattcttattgattttgtctctgaagaggccactgaacctgtcatgcatgaagaaattgcttcggagggcaacagatttatctgggcaattactatattgactaaggaaccaaggagcccaagttccttcttaacacaattgttatttcattgactagtgttacatgagagacaaggagagtcagagttcaaggacagcggaacgatgatggtctcctgggaacgaagcgcgatgctccatagagacttgaattctagaataaatcgctggaattgtgttggcagcagtatggatccattgtttgaaactaaattcatcacggtggttgccacgctgactgaaataaatgcccaacaatatacaaacgcaaccattgttccccagtgggaattattttagtcattgttagtgtgttttttgttgcttacattatatctggaaatgcaactgatatttgggaggcaactaatatcacaaacaacaagaagttaatttaacagtgttatattttttctttctagtactaatttattttaaatggcataccatggcccataaaaaacttacataagtttcaagtctaaattgtatgataagcccaatttctcaaaaagaaaatggccattattagaagttatattcaatgcagcaactagcctcaatgagaaaagtcatacatatgctggtgtttaaatattcagtgtaaatgtatgttgtccacttcttattacttgatgaatactaagggaaaaataagcctgagtgaagaaataaagacttcttgtgggttaaaaactacaaaattggtcaggtgcagtggctcacgcctgtaatcccaaaactttgagaggctgaggtaggcagatcacctgaggtcaggagctcaagaccagcctgcccagcatggcaaaactccgtctctactaaaaatacaaaaaattagcccggcatggtggcagacacttgtaatcccagccactcaggaggctgaggcaggagaatcgcttgaacccggaagtcggaggttccagtgagccaagatcacaccactgcattccagcctgggtgacagagagaaactccatctcaaaaaacaaacaaacaaacaagcaaacaaaaacactacaaaattagctttgttttcacgtattcctttctcaggtactttatatgggacctctttgtttcttctcactatcataattcatcctttgccccgagtcttgagagagaaccattcaggttcccattgccctcttccataaaaatgtctcaaaacatggtccctaaacctaccctcttgatgtaaaggttaatgctaaaaaaacacagaaaagatataagcttaatgcttttctccatttattatttgcattcatttaataattatttattgagcacctgtatgtgttaagagttgaatgtacaatgacacgcacattatgtcaaagaacttccaagtgcttacgtaaacttgcttctttgccaaacatccttacgttcattttaatttaattgtaaagtaaactaaaacacattgacacacacatatacacaatgtacttaaaagtggtcattgtttcaaactgcatagttattaataatgatattaccaggagtagcttaaaatggtgacaactggtttgattacaggtttacttgcaattaaggtagaaatttgtcaatgtttaaaaaatgtaattattttagtatttgatcacaaagaattaagtgaaataaacataaacgtagaaatgaagagtacatacttttactgatgtatctttaacagttttgtattttaatccttagaaatattcatataaacccaaacattttggcttaaagtgctatattttgacaaatatttgaggacttttcatggactctaatgtggtttaaattatgtctcctctgtgtatttatctcataatcttctgcaaagtagtcaaatggctaagcctcagatatattacctgcaaaatagaaataataatacctatgggcagatttattatcaagattaagataacataggcaaagtaattagcataagcgtctagcacacattaatatcaataagtggtagctgtcatttgagggcatatttagcaatagaccatcttccttcccacaaatgaagtacctcccagtaagcaaacgatggagatataattcctaaagccacatttctaaaccttatggcgctaacaccagatttggaaaattcttgaatatacatagatttggaagtggagaaatgaaaagtattctcagaattggacaatgtttccttggaattgctttcatcacttcaagacttctctcagctatgagatatcatttatctactaattttcctgagtataatttttgctgttcacttctagattgcaataaatcttttatttctatagtaatgatatgaaatatgaaatttcactactcaaaaatcttacatattttaagtttttatgtcctatatcaaagcaaaatgtatgtaattaactcctatattccagaaaaacattgctttattaattacattaataggtgtgattttctttattaaattatattttacttaaggctcaaatcagccctattttttatgttagtgaagttttcctactcattaatgtgaaatgtttgctcaaagacgtaatagggcactgttaatggaaaggatttcagcgaagtgtgaaccatttacaattaggtaataccaatcatggtgagaaagaagttccagaaaaactaacagtgttaatattaagtgtatcatggtgcctgcaatcccagaaccttgggaggccaaggtgggcagatcacctaaggtcaggagttcgagaccagcctggccaacgtggtgaaacaccgactcaactaaaaatacaaaaattagccaggcatggtggctcgcacctgtaatcccagctactcaggaggctggggtgagagaatcacctgaacccgggaggcagaggttgctgtgagttgagattatgccattgtactccagcctggataaaggagtgagactctgtctcaaaaaaaaaaaaaaagtatgtcatggaaatgtttaatacttactagagtaaatcaagctaaaaattaaagtactgttagcaaaacattttcagaatgcagtgtcacttgggaatgagaatgagtttaaaagaaggagcataagagttaaaagtaaaatgttaataaatgtttaaaattacagtattttataataaaaatgataagttaaaccatcaagattgtctgttgaaatttccaagtggacttactgtaattctaaaaattctttttttagaattttagatgacttagaaactcatcaaagtcatttaatattccataaaaataactaaaaaataagtttattcctttaagaacaattatatccacaaagaagagcaaatgtcagaaaaaaatatattaagcaagtagaaacatatgtgaagactatctcatttgtgaaaaattaaaatccttccaaaatggaactcttttgtggcatatcatgaaattataattgaactaaatccagagtatatccagagttgagcactgtgaatgaatgaatgttagataaatatacagaaacagagtgtggctgtggagtgtatacacctgtcttatatcagtgagagggatcgtatgctcatcaagattatctactcatcggggattctttctaaaccttcttcttttttgttgttgtttctttttttataatttttatttttattttaagttccaagatacatgcgcaagatgtgcagttttgttacacaggtaaacgtatgccatggtggtttgctgcacctatcaacccatcgcctaggtattaagcccaacatgctttagctatttttcctaatgctctccctttccctaccatcccccaacaggccccagtgtgtgttgttcccctccctgtgtccctgtgatctcattgttcagctcccaattataagtgagaccatgtggggtttggttttctgttcctgtgttagcttgctaagaataatggcttccaacttcatccatgtccctgaaaaggacatgatattgctcttttttatggctgcatagtattccgtggcatgtacgtaccacattttctttatccagtctatcatcaacgagtatttgagttgattctatgtctttactatcatgtatagtgcggcattgaacatatgcatgcatgtatctttgcaataaaatgatttatattcctttggatatatacctagtaatggcattgctgggtcaaaggatatttccggttctagatctttgaagaattactacactgtcttctatgatgtagtaaaccttcctctttaaattatccatttataagagaaatatttgaaatattttcatttgaaagagtgtactgaagaaatgtctgcgtaaaacaaaacacttcattctatatcacgtggagttagaaatcacttggaatgtccattaattcttgatattacgattgagattacacacagatcatattgacaaattttttttttaaagttaacctctgaaaaaatgttcttgctctcttgcttctgagtttgaaacagagttgagggaatattgtgttataactgacaatgggaattagcactggagttcagcttaggtaaaatcattttctaaagttatgcactttcagtaagaaagcaaaatgagttactattaagatgtaaaatatgtggctgtgagtacttatttttacatattgacaagtttactttcaaaacgtaatttcaactacatccagaaaaaactgatatatatatttttacacctatagacttatctaaatgttaatcattatacttagaagatgggacaatgagatatacatcatatatttgagatgattttatatgacacagtttcataatcaaccaaaatgggaaaacatgcaaacatttgaatggcttacataagaaacaatccaaattagctctcctctttttagtcagaaaagtatggatgtaaaattgtcaggtacttatggaagtaaatacaggaagttcttgtgaaatgcattagggtcaactggaattgaatacttgttcaacatttattgacattatattagcaacaggtgatgtgagaaataagacagtcatatttcttttattttttcttttttcttttcttgagtcggagttttgctcttgtttctcagactggagtgcagtggtgggatctcagctcactgcaacctccacctcccgggttcaagagatactcctgcctcagccttctgagtagctgggattacagtggcatgacaccacgcccagctaatttttgtatttttagtagagacggggtttcaccatgttggccaggctggcctcaaactcctgacctcaggtgatccatttgcctcggcctcccaaagtgttgagattacaggtgtgagccaccatccctggccaagacagtcatatttcttaaaacatttatagttatgtaagatgaacaaagaagtcaacagttacaatgggaaggtataaatgctatggcagtgaaatgttgtcagttctataggatctgggagaaaataggacagtctttgcaaaattggaaaagaaaaagcacttcatgtaaaactaatacacacacacacacacagtctaatactgtttcagggtagagaatcagaattgggaaacatgtacaccatcatgattctgaggtatttgacaagtccctttacttctccggttgatctctggctttaagttttaaattagaaacataccatttaaaatatgtgtacaaatggagtgactttttgtgttcctctttaaagaaagcttcactgacaatggaaaagttgacatgatttaatgtttttcccatgaacataatattcatatttgcagcaataaaacagctttgccattatattctatattcattaacaaaaagtactattttagattgctataactaatgacaaattttaaaagattttatttattggcacttaccacaagccaggtagtttgctgaaatcattgcatataccaactgatttaacaccaagcatactgtgagattggacttgctatcatttccattttataagtaagaaaacgagtacagagagaaaaagacacttcccaaagcctccctgacagttaaggggaagagccaggattcaagtatagtttaagagcaagttcttataaactacatgctaaatacattacaatatcatgttttacatttttcactagggcttttaggccagatgatataaactcacattgatccctgttccactggtggcaggcctgtgcaaacctaccccgaagtccaaggaagctaagaggacagggaagaaagaggttgacatacccagtttctcagaaagaaacattgaaaaaagccatgtctgtgtcttgggcagcagtgagacaagatgatgaattcttgtgccatcagcccccagactcagggcttctataccatagagaaagggcatacatgattaagaagagatatgtagtgcaattgaagtatgataaaatcaaggttgttttgacctaagggcaggatttgcatacctgcttttacctaaggaacaataggtaagctagatatcttagaccttccttaaactagggttaattagacatcagtatagcaaattagcatccaagatggaattactttagactccacagtcccattatatcaacagccctagcataggcccttatttataagtacccagtgctatactgtaaaataacattataaccagtcttttcattaaaagactattttaatcgttcttccaaacagatgttggaagattttaagattattgttatgtttatacagatatgcaagtagaataagaagagtactttcatatagcaccatgagtatgaaagcagtagatacaattattaaaagtataaaaaaagtaaaaaatctttaaaggatacacggttacctttttaaatcatatctaactgccatgtttatatggaagaaataaagagcacatagttatttcttagccaaaaaaaaaaaaaaagcctgtgattatacaaaggatatctaattagggaaaaaatgtaatcatagcacttaaaattaaattaaatataacctgagtttcagtaccagctctgttgctaagaagctgtgaggcctgtgaaaaatcatttaatttctctgagcctcagtctgttgatcggtactaaagggaataggaatcacaaattgatctctgaggtcccctcagactctcataaactatgatgatatgaaattagcagagtttgagtagaatgaattcaatagaggtaaacatgccaattactgcatactaatttagtgcttctctctctgaaaggcttgtgctttaaaagacacatatagcaaatagaaaagatttatgtagagatactcaaactatttaccaccatattttacttgcagaaaaatatttcccaaatcaaacatcttaatacatttgaaatttaataatgaaagaattaactctagcaatttaaagagaggtttggggttatgtaaaaatcttcatatctatatgcaacagaaagaatgctccattacaagctatatgcatggctgtatttgtgaggtagccttttcactaatttcccttgcatgttctattcaaacagctgttttttgttagataaacattattatatctattacattcctttgctctatattaaaacaaacttatacgccactaaattctaacatcatacgttggaatttgatattgtaagtatgtctctgacatgtataacttttttgaaattttttaaaaatgtattggatatttttctaagaacaagtaggagttatattttaaatggaaacatgtttcttttactagcaaaagagactctccttctagtattcatctctcaaattcaatgacaacttatgacaaattcaaataggagacaactgtcctttcagaaaaaaacctctaaaatattttgggatttttttcctcccacataaaaacctctatgtctaaaaagattacgttagattacaaatgcggaaacaatgacacaagaggggaagcagtgagtgcttctatgaaagaaaagactgactactccaaagatgatatacgttttcaaggcaatgatggatacctttaacatgccttgtgagacagaaggattagttctttcatctttcagcctggccaacacctgcgtcctcattttcctaggtgttgaaatagaaagaaagcacggaggcagcacagctctgctataaaaggctttgcctccaaatacaaaatataacttttgcttgaattcctttgattacaagatgtttatatggtcatttcgattagccttgcaatgaagccaactgcaaggacaactaggaaatatctgggtgctcacaaaaacagagcaaagaaaattttgattagcagttagagactcaaatgtacctatggtttttgtattgtgtttgttttgagctgctaccagttaattctaacttttatgttataatgcagcataatcaatgtccttgaattaacttcctaaaacatagaggataaaaggctatattaacatatttttccagaaaatgtaaatatactagctaataaaataacaagatcaaattataattgagaaagtactgctgtttaaatatttttaaacacctaaaatgggaaaaaacttattaaacattagaaaaatatttttatgtcttaaaaagaattgccagactgggtgcggtggctcgctcctataatcccagaactttgggaggccaaggcgggcggatcacctgaggtcaggaattcaagaccagcctggccaacatggtgaaaccccgtctctactaaaaatacaaaagttagctgggcgtggtggcgcatgcctgtaatcccagctactcaggaagccgaggcaggagaatcccttgaacctgggaggcggaggttgcagtgaaccaatcgcaccactgcactccagcctgggtgacaaaagcaaaactccatctcaaaaaaaaaaaaaaaaaaaaaaaaaaaagaaagaattgacaaacgtaggagcagttatgtaaatacttaacatgcttattgctttatgtaacacaagcctttatcacattgattggagttttttctgagctatatgtaaaaacagaaggtcagaaaacttacaaaatcattattgtaaagtaaagaagaactaaactgtgaaatcattgctttttttagatgaagttactgaagtgactcaagatgctaaattcaaaatttcttcagttaccattgtacttgtggaaaaatattgtcaaaaagtgtcattgtttatacaggaaaactttctttaaagtttagagtaagacaataatcaaatatcacattatcatgctgaaaaaagatggaaagtctattaatatatatgcctatatatttatttgttaagcaaacaatatgtattttttctatcatgctatgttagaatttttgtgtctagctatgatggagtaatcatgaacatctatgaaactacagaatataggaggtaaagatttttcagtattttacagcaggtaggagcaggacaggatgtgatatttgagagaaatacatagaaagaggtgaatcccatattggcccctgattttggtctaagagaagtttctcagcgaaagtgttgtaagcttttttcaaattttgaatcttacctcctcttcagcacaacttgcctgcctacatgtggagaaagttctgtgtttaaaatctcacgtgattagattgggcccgccggaataagctccctatcttaaagtttgtaaccttaattatatacagaaccctcacaattgttttcttctcttattctcttaaatgactgccatcagtttaaagcaaaaaaaaaaaaaaaaaaagataaaatgactttatttcgttttgagaggagaagccacctggacttcctgagtcaagtggtaacttggagaacttttctgtcttacaagaggattgtaaaatgcaccaatcaccgctctgtaaacggcaccaatcagcattctgtacaacgcacctatcagcaggagtctaaaagtagccaatcgcagggaggattgaaaaacaggcactctgataggacaaaaacggaacatggaggttgggtgcggtggctcacacctgtaataccagcactttgggaggccgaggcgggtggatcatgaggtcaggagatcgagaccatcctggctaacatggtgaaaccccatctctactgaaaatacaaaaaattagccgggcgtggtggcgggtgcctgtagtcccagctactctggaggctgaggcaggagaatggcatgaacccgggaggttgagcttgcagtgagccgagatcgcgccactgcactccagcctgggaaacagagcaagactccatctcaaaaacaaacaaacaaacaaacaaaaaatagaacgtgggaggggacaaataagggaataaaagctggccaccccagccagcagtggcaacccactcaggtccccttctacgctgtcgacgctttgttctttggctcttcacagcaaatcttgctgccactcactctttgggtccatgcagtctttaagagctgtaacactcatttccaaggtctgcggctccatccttgaagtcagcgagaccacgaacacacaccggaaggaaccaagtctggacacagtttaacatattttactatatgtagaagaaaaatatacaggaacaataacataaatgttgggcagaggtaaagggagtcatatttttctcattttgttatgatttacctgaagtggtacaatattaattcttagcagacacttgtagaagatgcctatttagatttcaggagcagtgacttcccaaacaaaatataaagcagtattgctagaaagcaaatagagaaaataaatggaaaatatttagaagtatttaattaactcaagacaggaaagagaaaaaacagaacacacaaacgtggaaagggcaaggtataaatgtttttagatggtatttaaacataaaccaagtataaaagacagagattggcagcttttatgtaaaaagcaagacttaactatgtgctgtattgaaatttcgtttgaaaaatcaatcaatgcaatttacgccagtaacctaatagagaagaaaacatatcattattcccatagatgaagaaaaacatcttgacaaaatgtattatttaaaccattcagcaaattagaaagagaagaaaatttcctcagtttgagaaagggaatcaatgaaaaacagctaataccacatttaatggtgaatgacagcttgaagttctcctgaaatgagaacaaaggcaataaggtttattatcatcacttctattcagcaacataattatggactgtagccaattaaataaggcaaaaatacgtataagaattgaaaggaagaaataactgtattcagacataaaacggttagatacacagaaaatagtaaggaatctgccacaattaatgaaattcatatgtaagtttttcaagcccgtgtactacaaggcacatattgcattccctacatactaccaaaaaaatggaaaataaaattaagagcacaatgccatttaaaatatcatcaaattgcttaaaatacaagtaagtttagatagaaaggtaatagataacagttgatagatagaaagatagctattgttataggtattatatgctaaaaattataaaacattttaggaaataattgaaggtgacttttagaagctaagttatatcgtagaatcatgggtggaaagattcaatattattaaaaagtcatacatctccattagtatatagagtcaatcaaaagaaaatttcaacaatttttatagcttcgctttagatattgacaagctatttacaaacttattgaagaaatgcaaagcaacaaagccaaaataaactgtagaacaagtttttttttatatatatatgaagtctcgctctgtctcccaggctagagtgcagcggagcaatctcagctcactgcaacctctgcctcccgggttcaagtgattcttacgattcagccccccgaatagcaccaccatgctcagcaaatttttgtacttttagtaaagatggggttttgtcttattggtcgggctggtcttgaactcctgacctggttatctacccgtcttggcttcccaaagtgctgggataacagatgtgggtcaccgcacctggccagaaaagattttaaaaatgaaaaacttggaggacattaacgtctgatttcacaacttattataatagtacaataattaagaaagtggtatattggtgacagaaaaggtaaatatgccaatggaagaagtagagcctatatatatatatacccagatatatatatatatatatatatgtatatatatatacccagatatatatatatatacccagatatatatatatacccagatatatatatatacccagatatatatatatatatatatatatatatatatatatacccagatacatacatatacccaggaggggtgtgtgtgtgtatatatacctgggagggggtgtgtatgtgtctgtgtgtgtgtatatatttataaatttatatgcagaagggtgtatacacacacacacacttggaatggtgtatatatccatatatgcacatatatatgtgggagtgtgtgtatatatatagacaagaggatgtatatacacacacacacacacacacacacacacacacacacgtatatatatatatatatatatacccaggagggtgcatatatagatatatacagcgagggtgtgtgtatatacacacacacacacacacacatatatccaggtgtatataaatatatacatacaagcgggagggtgtgtatatatatatatatatatatgcgggagggtgtatatatatatacatacacacccaagagggtgtgtgtatatatatatacctggaagggtgcatatatatatgtgtatatatatatacctggcagggggtatatatacatacctaggaggggtgtgtgtatatatttttatatacccgggagtgggtgtatatatatatacatacacactcaggagtgtgtgcatatatatgtatccgagagtaggtatatatgtgtgtgtgtatatatatatgtgtgtgtgtgtacatatatacacacacacacacacatatacacacctgggagtgggtattggagggggtatatatgtagatatacaccctggagttggtatataaatatacacccaggagtgggtatatatatatatatatatatatatatatacacacatacctgagagtgtgtgtgtgtgtatatatatatataaacaccagagtgtgtgtgtgtgtgtgtgtgtatatatatatatatatatatatatatatatatgtatatgtatacctgggagtgggtatgtatatgtatacctggaagtgggtatatatagatatatatatctatatatgcctgggagtgggtatatgtgtgtgtatatatatatatgggggcaggtataatatatatataatgggagtgggttatgtgtgtgtgtgtgtatatatatatatatatatatatatatatatacacacacacacacatacccaggaggggttatacatatatatacgtggggttgggatgtatatatacccggcagtgggtatgtgtatgtgtatatatatatatatatacacccgggagtgggtatatatatatacacccgggagtgggtatatatatatacacccgagagtgggtatatacagccgggagtgggtatatatatacccagtagtgggtatatatatacctgggggagggaatatatatatatacccaagaggggtaggggtatatatatatatatatatatatgtgtgtgtgtgtgtatatatatatgtgtatatatatatatatatatgtgtgtgtgtgtatatatatgtgtatatatatatatacacacacacacacacacacacacacacacacaccagggagtgggtatatatgcatatatacaactgggagtgggtatatatacatatatatatgcagacacacacccaggaggggttatatgtgtgtgtttgtgtgtgtgtgtgtgtatatatatatatatatatataccctggagggggtatatgtgtgtgcatgtgtgtttgtgtgtgtgtgcgtgtgtgtgtgtatatacccgggaggggtatatgtgtgtgtatatatatacccaggagttggtatatgtgtatgtatatataccctatataaaaaaatatatagatattttatatcgatatatagatatgtatcactgcaattggctacttttagactcctggtgattggtgcgttttacagaatataatatataaatatatagatatggatttataaatatatcaatataaaaaatatatgccctgtatgtatttttaaaaatcttgttttacagtttatttcggctttgttgctttgcatttcttcaataaatttggaaacagcttgtctagtaatagatgttatatacatatatataaccaatttgttttttatagagctatgaaagcatttaacatacaaaagagtgtattttcaataaattgtcttgaagcaagtgactatcaataataaaaaataaaacttgaatgttacctcataccacagccttattataattaataaatataatcaatataatataattataattatcataatataatatatagttttataagatgtagtattataactaataatttagtattccaattaataattaattataattattataatacaataatataatatagtattagaaaacatgatggttgcatagtataattaattatattaatataatactaaaatagtaattaataaaaataattaatcaaattaatttgtgtattagagttgaagagatcatttaactttgaaatctagaactctaaaaattcctggaaaaaatatttctgacctttagatgagccaatatgacaattttacaaagaatacaaacacttcttaaaatgatcaattggacttcatctaaatcaaaaatatatttgaaaaacaacactggagaaggagagtgagagacagagaaagaaagagagagattttaaaagaaagtcactccttaaaagggagaggaaatattcacaatatacaaatatatgtaatgattgagttgaatgaagaatctagaatataatgaataattaactatgaggcaaaaaaaaatggctaaagtcttgaacagacatttcacaaaaaatgttatgtaaattacacttcattagctatcaggaaagtgcaaattaaaaccataatataaagtactttttttttaccttttctatgtttatatatgtttagatacacaaatgcttaccattgtgttacagatgtccatagtatttcatacaagtaacatgctatacaggtttgtaacctaggagcaatagcataggccttaaagctaaggtgagtaggaagctgtatcattgaggtttttgtaagtataccctatgatgttcacatgaaaacaaaatcacctaatgacacatttctcagaacatattcccatcattaagtgacacattactgtatcattgttgcaatgtctaatttttacttcaattctttcagtttctattttatgtcttttgtagatttgttgttaagtacatatatgttaatgattgttacatctttccgatggattgaccctttataattaggaaatgtccctctagtaatatttttttctttaaagactatgttgtctgacagcttttctggctctttttatgatgtttgcagagtattttctttttaatacttttactttcaacctatttgtgttatttgaatttcaaatacatcttctttagaaagcctatagttgaatcttacttaattcagcctgacagtcttcactttcgattggattatttaatccattcatacgctgtaattgataggatttcatttatattttacatttagctttttgttttttatatatcttctattttttagtttctccatttgttctttcttgcatccttttgcattaaatattttccaacattttaattcaattaatattttagtttttgaggtttttcttagcagatacactagggattatggtataaatcttaactgatcatactctagctttataatgacttagttacaataagatgttaaaatattccacctatactgttcatttccttctccacttttttatgcagttactggtatatatactgtttatatttgatatagacctaacagtacatggttatacatattactttgtattaccttatgtattttaaagaggctaacgaaagaagaaaaacaaagacatatttatagattttgttatagcaacccttttatttactgtttcttgctctcttcatttcttgtggatttgagctactaactagtgtcatttgtttgtgccaatacagcttttttttcactcaactgttttatgctgttattggcaaatgtattacatttctaaaagttataggttcagcagtgaagtacatacatatacttttgagacaattgctttttaaatcagtaaagagaagaaaagaggaaacaaaatgcaattatacagtcttttgcaactaccaacataattagctttacctgcactcattgttttttattctaatctaatgtctcgcttttattttaaagaacttcctttagaatttcttgtaaggtatgtctttaagcaatgattgtgaagctaaaattgtctttatttttcataatttttggaacttagttataattagcaaaacacgaatataagactcttgatttgcaattcttttgttttgttttgttttcttttcctactttcatctctttgaatctgttgtaccattctgaaattcattgttgagataagaagtcagccaacagtcttactgggatgcaaacatgcatactgagtcatttctccattgatgttttaaagattttctctctgtctttgacttttaacatttgattatgaggtatctgaatgtagatctctttgtggttatcctctttggagtttgtcatacctcttgagtgagcagattaaatttttatcagatctggaagtctttcagcccttattcctctatgttgattcttcttctttctctcccttctcatacatattttccgggataaatgtgtatcacatcctttcaggcactatttttcttgaattgttctttgattggtgtttcagattacataatctctattgatctatcttcaagtttgatcattcttttattctcccaattcaaaactatttttaaattcctctggtgaatgtctaatttgggttattgcatttttccaactgcagaatttccatttcattatttataataatttctatgattttatcaatactctgtatttaataagatactttcattttatcttcttgcatttttttttgcatagtttactttttgaacatatttacggtagctacattgggtttgtgatggctgattttatggtgaactttactgagacaggaagtgccaaaaatcgttatttctatgagtgtctttgagagttttctggatgaaattagtatctgaatcagtgcattcagtaaattagatgcatctcctccaaatgtgcgtgggtattgtttaatcttgtgagggcctgcataaaataaaaaggtggaggaatgagaaatttgccctttttttcttcctgcttgcctccataaactaggacctcagtcttctcctgccctcttttgggatttatatcatcagcttctctggttctcagtcctgttgaaacagcctcgttgtctgagtgccacatgaatttctttgtctcacagccgaggaaatcaaggaaatggacattccaagggtgaggttagagcagaagtttaataagtgaaagagagaaagctctctgctgcaacccccaaaaaggttgctgttattacagttgaatgcaaaggctcttataaacaacaaatgagggctgggcatctcatttgcataaggagcaaatttctggcagctccaccccaatctgttgtgcatatgggcccttagtttgagttactccatattgctttgctccccttactgtgcctgtgttgagggatggaattttccattgtgggcatgtctgggcaagtcacatgtgtagcctttcttatctatgtggctgtgggcatgtcttaggcaagcccctctgtgtaagttcccttatctatgcctgcagcttgaatttttaggctgttctttggtttaaaacaatttacccaaggacccaccctaactgactgcctgaccagtttcttcctttctcctctctcattgtagtctcagataccactagctttcctgagtctcaagcttgcagatggcagactgtgggacttctcagccatcataattgtatgagccagttcctcataatatattttcctatctttcatgcgtgtccatgtgaagagaccaccaaacaggctttgtgtgagaaacttggctgtttatttcactggggtgcaggtgggctgagtccgaaaaagagagtcagcgaagggagatggattaccattagttcttataggttttgggttaggtggtgaagttaagagcaatgttttgcggtcagggtggatctcacaaagtacattctcaagggtggggagaattacaaagaaacttcttaagggtgggggagattacaaagtacattgatcagttagggtggggtaggaacaaatcacaatggtggaatgtcatcagttaaggctgtttttacttcttttgtggatcttcagttactttaggccatctggatgtatacgtgcaagtcacaggggatgcaatggcttggcttgggctcagaggcctgacactatctatgtatctatatgcatctattatctacctatcatctatctcctactggctttgtttctctgaagaaccttgactaacataaggtttttgtcttttagttccatcatctgggccccttcaaagacagattctatttcctgtttttggtttctaagtatgtgtacacttacttgtttgtttatttgtttttagaaagctggccatttctgatgatacaggatggcaactctatatcctgagggtcccttcccagaggttgctgttgttgtttcttgcttggtcactttttatttgtttgtttgtttctttatagattttactgaactaatcctgtaaaataccttttctttgcatttgaaagcctccaatatttctgcttaaattattttccccttatttttatatttgagctgaacttcccatgaatcagtgggttcagtcactcttgagttggcctaagctgtttattttattttacaaagggtttacataaggcatctgagctatttagattttactgtttgctgtgagatgactctgtgtgtgtgtgtgtgtgtgtttgtgtgtgtctgtatgtctctgtgtgtgactttttatgttctaagtttcagctagacaccactagtttgaagtcaccctatttcatcactcctaagtgaatttggtcttgggatgcacgcagtgttccagaatgccaggaattaagtaattttgttttaatcctaactgtctagaatcactcatggttcccagtagctttttattcaattagtggttttatttaagcccttatgtcagtggatcttttatcctctgttgatgagtctgtctgtggcttgtggatacactcaagtcaaccccacgtcttgctctgattgctcctgagtgggtgcaaactagatcatgttacaaactagtgcacaagctccctaaatcccagggtgtctctcattccagaaggcctattcttgactttctcattccttgtttctctctattaaacttactatggagctaccaactccctcttattttttctttaacaagatctctttcatttttttttattacactttaagttttagggtacatgtgcacaacgtgcaggtttgttacatatgtatacatgtgccatgttggtgtgctgcacctattaactcgttatttaacattagatatatctcctaatgctatccctctcccctccctccaccccacaacaggccccggtgtgtgatgttccccttcctttgtccacgtgttctcattgttcaattcccacctatgagtgagaacatgcagtgtttggttttttgtccttgcaatggtttgctgagaatgatggtttccagcttcatccatgtccctacaaaggacatgaactcatcattttttatggctgcatagtattccatggtgtatatgtgccacattttcttaatccagtctatcattgttggacatttggcttggttccaagtctttgctatttcatttttttaacatcatcctttggcatgaggttttccattttccatttccacacaaatgaagtgtagaggaaacaaaatttcacctcgatgctcttagcgttccaaatgggtcgaataattacactgatctaagatatagattaatagagaaaaagtctaatacaaattttatgtagcattggagccctcataaagaaatgaagaccccaaaaaaacaaagtcagttacttatttactgaattggacaaatagtcaacttgagaatgtgataaggcaaagggccttgggttaacacagttaactgggtagagaagtagctaaaaagataagggttggtgtactaaccctttagaagtagctaaaaagataagggttggcttgagtctcaactttctcgtccttgattagaatgtttttctctagtatagggacggtatctttcacatgggaattttctctgttttttttttgagacgcactcttactctgtcgcccaggctggagtgccgtggtgcgatcttggctcactgcaagctccgcctcccgggttcacgccattctccttcctcagcctccccagtagctgggactacaggcgcccgccaccacaaccagctaattttttgtatttttagtagagacggggtttcaccagtttagccaggatggtctcgatctcctgacctcgtgatccgcccacctcggcctcccaaagtgctgggattacaggagtgagccactgcacccggccccgaatttcttctgctgttaagacatagcatgaaggtcagaatgatcttcttgcacctgctgtttttcatgtgcttttaatttactgtttatgccagggtggtacatttttaactccttcaaaagccagtccccttaagcagagcttttcctggagactctcactgcctctacagtgtacggaatttttagaagtacattaaaataatgctaagtactttcttattatgcagaagcaaattgaatttaaaaactaatctcagatgagtgttagccatgtgttttgttttgttttagcctacttagtgagatgttttaaaatctgtgcattatttgatcattttttctgcttttgctgttgcgtagtgcatttttgagggatatttaatattacctgttactactcactaaatgtcagtagtactataccaatcattgtgactatcacaatgctgtagcaaatttataatgtatacacttttataagaatgtggccatagcatatatatattctataattagagtgtttatgaccataatatatctttgacaaaatttaatctcagtttgcgaagatctacctcatttttaactgctatttagtttcaatattatgtatgtattttatttttctattccaaaactaatattaggttgccctctgttaaaattttccaggtggattcgattccaaaggctcctatttaaaaacctttaaaagtaatttctttcagattaattcattatcaccatagttagaccaaacaaaaattattttaaaatatgtcatgccttttagcttaaattttacttttcacaaacatgatttcttttgattttcccaacctactaagattctattatcatatgttgtagaggaaaaaatgaggatcaaaagggctaagcaattttgaaatgattgaacaacattaagagtcagagggaaatttaatagcaggtggttatggctcttcttttccactctaaggcagggccactctcctatgtctgatctaaccacttcacacttctaccaatagtcttgaattctggtcttttaaaatatttcttccttcatccagctttcctgagtaggatctagtgtgtaaattgaaatgtcccttccaaagaaagcctataagcaatgaaattgtttagaaattggggaaatgtctgttaccttgcctacaagatcctattccatttatcgattgcaattgcctcgatcaaagctgaagggcacatgaaattcactatgaagcctgcaaactgcagaacttgtggcatttatttctttagtttgtttcagtacaaaaccttgaaatttgcccttgtattctgaacagatttttaacaagcattattgctattgtgtgtttaatatcaaagaataaacaaagacaattcccttgaaaaaattatgctaattgattgaaaagcatcaaaaacatttacaattcttttaatgagtagataattctgcattgatttttttgaaacacaagcattttctggcatagaaatatgccagatctctattggttatattttgcttatatttttctctaagtcaatattatgaatgctatgtttctattgctacacatacattattttacctctagttgacaatgaaaaacagcagactagccaattatataaaaggatcataagagaaaatatattttcattttctggaaattgtatttctcccaaatctcatcttcatagagtctacaaattcattttccttagattaaaattgcttccagacaaaaaatccagaatgataattggagtattatcttcctagttggaagtcaaaaatagatacttttttttcttctgtttaggtaataatagttctcatccaaaataggaatctggcaaagaaaatgaaggagggagagagagtcgcatggtttgactttgatttttttccatgtaataatcaggagataattctgatcgcatgcatcatctggtgcgagaataacgcccattcaattgagccttttcatctctaaaggccattttatcctcaactttatagtcacctttcttgactacagtcgcaatagttaactctgtaagtttgaagatattatgggaagttgagggatctaaagagcatgtgaataggctgacactgcatcagggaaaataaaacaaaacaaaaacaaaatagcctgtcatttatggaagaacattttgggctctttaatgtgagttaagaagaacatattttacctcttataataggatgttattaatggtcgaaaatatgctactaaaatagaatcaagctggagaaacccacccccaactataagaaatgtggcttggaaatataaaaggactcacactgaagaatagtcctaagaatgttagatatgtggtaatgtcttcagtggttccagctctgtttgatgacataaaataatccattctggagaaaaactttatgaatttttgggatgtgggaatgcttcattttctcacatccattcaaagacacatgataatgcatattagagatggaccttgaaaatataagaatgcacacctaactgaaacccaagtagtatggaagtactgaaaagctctccatttcaacaattattttaaaagtcacatgaaaactactagaatgaaattctacaaatgtaagtaatatggaaatcctgaaacaaattaattattgtatagtgcttgagaaaattcaaaacatgaaagaaatagtatatgagttacacatatattgtgtttatcagtggttcattatgaaagagggtctctgcgctacaattttcactgcttttgcaagggaacattgaggtgagaattgctcagatacttcgtaatcaacagtatgagtttaacgggcagtggttttttttaagccagttaaagtatttttctatccattttaaagtgtgttgaatcttagagtgaactaaaatgtattcctaatatataggtaggtttaatttttatatagttgtttaattcttctgtgattaataggccattgaaaaatgagtatttgattattgttgagatttttcttattcaccttatctggaaggttctgaatatcctcacccattttatatattccaccttttattcatatgggaaaaacttctcttttttggtgtaaaaatatttatcttattttcttgctaataaagagttggggttaatctgtaaggatgtaaagtttattatggagtatagtctcatgtgaaatattattttcatatattgccctttactgtttgtcattatttctgcttgttatttggatatttcacttgaattaaagagagcactgtgatagaacaatatattgtgtctaatctgagagagaaaacctccagtctcaccctcaagtataatgttagatctgggtttttaataactgccttaatgaaggttgaaaaaaagaaaatactgtaacatgtttattcatttagatatttagaaagttataaatattttatacattcttgagataattctttagaaaacaagaaatttcttgttgcatataatgtgtatgcaacacattagatcagtaatataacaagctatgtggaagaataacagcagtaaaaggcaattatatattaatacatttaaacaataagaattatcgattacattattaaaaatcaaagaagattgatgactgacaggcctgttaatatgtgttgcatggtaattgtttgggtgtctgtgtgcatatgtgtacacatatacacaaatacatatatatgtatagttatatattatttataaaaccatcaaatcatcaattttaacataaatttacatcataatgttttatataatctctaattataacttgcatattcttttatcaacttattttctatataaaaatttctaaggtcctcaagctgccattatattcctcaggacaaagggcgttttagtctttacattttaaagtaatttataataatgtgagatgatggatatgttaatttgcttgatgcagtaaccactttactatttatatgtagcaaaacgtcatattgtacattttaaatacatacaataaaaatgagtagactaatttatgatttatgttattacttagtctttaaaaatttcatgaacaattatttggttaaatattgctttttactttgcagataaaaccaaattttttttttaaatgaaataaagcaaactgcctttgtgtaggcatttctttttcaaacatctgtagacacttaacagcttttatcactggtgagagaggtggctcatgcctgtaatcccagcactttgggaggctgaggcaggtggatctcttgaggtcaagagttcaagaccaaccaggccaacttggtgaaactccgtctctactaaaaatacaaaaattagctggcgtagtggtgcacgcctgttaattgcagctagtctggaggctaaggcaggagaattgcttgaacccaggaggcagagtttgcagtgagccgagatttcaccactgtactcacatctgggcaacagggcaagactccatctccaaaaaaaaaaaaaaaatagattttacaacaaatctatttcaaattatgtagtattacttacacgttaaatgtattgtgcatggaagtcaatgctttaaagattttaaaatattttaaatatgattgttttagttaaatagaatttgactatgttaagtaatttgtccaaatgattgtatattttggattaaaaataagtttgcaacaaacttttatttcaaaatactaacatctgtgtttatctaaatcaaaaacgtgataaagttctatttcaaaaaataaaataaaaatttcagaatacataaagtagaaattaaaagactttcttaattttaactttctgtatacttgctattagtttataatatatagactatcttaagttaaacattggcatttgtaataacaggtgctgtacatatgtgtgtgtgtgtgtgtgtgtgtacatatgtctctgtgtctctgtgtatatgtatgtgtgtgtgttagaattaaaaaaggaatcaagaagctgaggtgggagagtagcttgagcccaggagtttgaggctacagttacatgctcacactcctgcactccagcctgggcaacagagtgagaccaagtctcaaaaaaataaaaatagaaaaaggaatcattgcatgtgagaatacatgaaactctttttgtgttcattagctacagaatgtttcattgtttgtagtcccataaagtgaaataagttaattagtctgcaaaaactctacagtattaacaaaaaatacataatttaaaaacaaatggacaaagagaaaatgtgtaagggccagtaaagcagagcatagttgttaaaggacttgttaacatattataataggctgttagataaactacagcaaacattcttttgaagtcactactatgctcaaaatcattaaaagagcatcctatgggccttagaaaaaaacaatatgtaaaaagctgagactgatcaggctgctcccagaacatataaacttatcattcatagggtgtggagagaaaatgttaatgccagagtgaaacaaaggcagtgagtccatgaaatattccaaagctccaaaatggagctaaacctgaaaggacttctttaagtcaagatccaataagagggaatgctcaattgcttatatgacattgacgttatttctttctcacatggcagtccataggtgaatgctccaatattggtagagtttctcctctgtggaattatccaggaccataaaatggcagattggtgttagtcatactaagcttatggcttccatcactaggtctacagtttaatattatagaagccatttctgtccatatgatcggtaaagacggcaaaaaaggttatcagttgacatgtacttttgaataaattcagggtatttgaattggcaatatgtacgaatatttgacacatgcatacatctttggtacaatgattctacttctaagaattttatttatagaggaattatgtagatgtgtacaaatatgtgaacagtaatgtagcatagcattgattatatgattaaactatgtaatctctattttttaaaaaatttatgtgttactggtgatttaaagtagccttgtttttcagaccttagttaataaacataaaagaataaggagagatttctgaaatgtaattttaagaagaaaatatttttaaatgtttaaaagtggaagaatttattttatcttcctttccggatgttaaaaagccagaatcccccaaattaaatgcataatattgcatattatatatttatgtaatttgattgtatttgcatatatatacacatatgtgtataaatatatatatatacacatatgtatataactaaatgaaattactagaaatatgaactaatgaaaataatagatagtgttagagaaaggacatgggcttggagaaacatttatctcaatttgaatcccacctctactatctgtgagattttcaacaaattattgattttccctcattttcaatttcattacttgaagaatcagtccaacgaagactttatttgtgtaaccatggatactagatgaggcagtgtttgtaaagtactcagtacaatgctaagaagtaagtgctcaacaatgttagttttattgctgtttttgttgttttcattattgttactgacatacatatttattaaagctatctctgaaatcatctgtgtcaataattgtacacataccgtttttaaagaggttaaccaggctctgctacaatatttccagggacagggacaacattatattttaagagatcccacaacctgtaagtattataattgtacataactgttgctatacaaaatataccccagtatatgttagtaaaatgtataactttaatattttaaatatatatccaaaattcttgtgttttcctaaaaatatatgagtaagtaattcatacatttaaggtattttattatttagaataaaatcaaaagtaactataaaggataactagcatataatcaattagatgagacaaaatgcagttatggatttcctttgaaagccaattttttttaaaaaaaacatatattgaagatggaaggcttataccttgcaaaacaaggcttatatcttaagccattcttgaaaaataatgtttaatatttaggaaaatggcagacttgtacccttccatatttctattataatagacttattttgaaaattagattttgcttattagcatgttaaatttcattttgctgggagagggagattaatgagcttaaagcaataattgcctaggcacctgtaagaaagcactcatatagaggaagcctttgattttagttttcttaaatacagatctcttagattgctttctttttgcacatagctagaatgtaattaaaatagataattagagaaagtaattactgagtacttctttcatccttgtgcattcattaaggattatatataaatctaaattagcccgaaatgtacagtagttgacagtttgaaaactatcttgaagtataacattaagaacagtcattttttctcataaatgtgtgtgtttaacttggaaccatgcacagttctattaatttgtataactggggttttaaaatgatgcaaagtagtgaatgatggactagcagaaaaatctaaatttctattttatatttattttaaataaaaagaaagagatttattttccttattctattttacttgtttataattttatatccccaacattttgctgagtcattattatttcttttcttttcttttcttttcttttcttttcttttcttttcttttttttcttttcttttcttttctcttcttttttgagagggagcctcgctctgttgcccaggctggagtgcagtggcgtgatattggctcactgcaacctcctcctcccaggttcaagcggttctcctgcctcagcctcctgagtagctgggactacaggtgtgcgccaccatgcccagctaatttatttgtttttagtagagtcggggtttcaccatattggccaggatggtctcaatctcctgacctcgtgatccgcccaccttggcctcccaaagtgctggcactacaggagtgagccactgcacgtaggctgagtcattattatttttattatttctataagataaactctatgcaaattgatagcttttccaacttaattgtcctgttcagaatatgagctaaggtcaatttttcttattattaaaaacaaagcaccaaacaatgtgaattgttactgcattatagtcattggtgtctcctactggaagtaaactccaaatatgttaattgtatagaattccaacccaaataaagaatcatagaagaatccctagtgttactagatattaacatttgcaatcttgagtaaattagattatgatgtgaattgaatgaatttacaggcaaaccttgttatattgcacttccttttactgcactttgcagatacagtctttttttaacaaattgaagatttgtggcaaccctgcatccagcaagtctattagcaacattttttcaacagcatatgctcacatcatgtgtttgtgtcacaatttggtaattctcacaatatttcaaacttaatattgattattattaaatctattttggtgatctgtgaccagtgatctttgatgttgctattataatcgttttggggaatcccaaaccaaacttataaaagacagcaaacttaattgatagcgggagtgtgcgttctgactgctctactgaccaccgtttcgcttgtcttctcaccttctcttagggtctctctgttccttgagacaaaacaatattgaaatttggccaattaataaccatactggggcctctaagtgtccaagtgaaaggaaaagctgcatatctcaccttttaaatcaaaagctagaaatgattaagtttaggtaggaagacatgtcaaaaaccaagaaaggcccaaattaggcctctcgcaccagttagccaagttagaaaagcaaagaaaaagttcttaaaggaaattaaaaagtactacttccgtgaatacataaagaataagcaaaacagctttattgctgatataaagaaagttcgagtgatctgggtagatgatcaaaccacaatattcccttcagacaaaacctaattgagggccagtattaactctattgaattctaggaaagtcaagaaaggtaaggaagctacaaaagaaaatttgaagctaagagaaattagttcatgaggtttaaggaaagaagctgtttttataacataaatgttcaagatgtaatagcaagtgctgatgtagaagttgcagccagttttccacaagatctagctaagaaaatcaatgaggggggctacactaaacaacagattttcaatgtacataaagcagctttctattagaagaatagaccacctaggagttttagagctagagaggaatcaatgcctgacttcaaagcttcaaaaaataggcggcaagttggtggaatagtaagccaccaagggctacagctctctgtgactccaagtgaagttgaaaagcattctaggccataagaactgcaactcttaggtgagtcctacggctgaactaggcccagagaagggtaactagggagtcacatgacgtactgagatagaagctggggtagccaaaggagttccggcaagggagttcccctaacctcaggctgcacacctcagagctccaaaagcgactcttcccttctgcatgaggggagcaaagggaagagcagataggactttgttttgcattttggataccagttcagccacagaagaactctggacaccagccagagttgtgaggtccctgttccaagccctagctcccagatgacatttctagacataccctgggccaaagagaatctgctgccttgaagaaaagaacccagtcctggcaccattcatcacttgctagttaaagagtccttggaccctgaataaccagcagtgatacccaagtcctacatcaagggcctttgtgagcctctgaaacttgctggcttaaggtgagactcagcattctaccatctgtggtggctacagggcaaaactccttcggcttgagaaaagcagagcaaaaattaaaggggactttatctttcacctttaggtatcagcatgcccacagcagggtggagcaccaagcagcgtgttggaatccctgattctaggactaaagtcttagatggcatttctggacctgccctgggccagacgggagcccacttcccagaaggtgagtcccaggccaggcagcattcaggacaagctaacttaagagaccttgggccttaaggaaatattggcagtattctggaagtactctttgtgacctggggtggtggtgactctggggtgaggctcccctgccattggaaaaaaacagggaagagtgggaaggactgcatcttgtggttggagtaccagctcagctgcaatacaatagaataccaggtagacttctacaatttttgactctagtccctgactactggactgtacttctggactcacccaggacctggtggacctcgccatcctgaagggaatgacacaagccttgctgcctttaatatctactgatagtcgagtctcagggccttgagctaacataggtggtggcctgggagtggttacagcaggccttgggcaagacttagtgctgtgttggcttcagatcagactcagcacagttatagtgatggtggccacaggggtgcttgtgtcactccatccccagctttaggtaactcagaacagtgagagagagagagagagagagattctgtgtgtttgggaggttgtaagggaagagaacaatagtctttgcctgataatccagagaattctcccagatcttgtccaagaccttctaaggtggtatggtacctctacaagtctgcaagaaccacagtattactgggctttgggtaccctctaaagcagatggagtttagatcacaacacccaagtcatttcaaatacccagagagacttcccaagaaggacagctacagataagcctggacattgatgactacaataaatacccaactcttcaatgcccagacaccaaagaacatctaccagcaatgacaccatccaggaaaacatggcctcaacaaatgaactaaataaggcattagggaccaatccttgagaaacagaaataagtgacatttcccatagataattcaaaatagctgttttgaggaaactcaaagaaatgtatgataatacaggaaaggaattcagaatcctatcagataaatttaataaacagattgaaataattaaatataatcaagcagaaattctaaagctgaaaaatgcaatttgcatactagaaaaagaattagagtccttgaatagaagaattgatcaagcaaaagaaagaattagtgaacttgaagataggttatttgaaaatacacagtcgaagagaccaaaagaaaaagaataaaaagcaatgaagcatgcctacagcatgtagaaaatagcttcaaaagggcagatctgcaacttattggccttaaagaggaggtagagaaagagataggagtagaaagttcattcaaagggataataacagagaacttcccaaatctagagtaagatatcaatatcaaagtacaagaacactacagaataccaagcagatttagcttgaaaaagcatacctccaggcacttaataatcaaactccgaatgttcaaagataaagaaaggatcctaaaagcagcaagagaaaagaaacaaacaatatttaatggagctccaacatatctggtggttgacttgtcagtggaaactttacaggtcaggagagagtggtataacatgtataaagtgctgaagaaaaataacatttattagaagagtatatctggtgaaaatatatttcaaacatgaagaagaaataaagacttccccagacaggtaaaagctgagggatttcattaataccagaccttttcaacaagaaatattgaaagaaagaaaagaacattagtgagcaataaaaaatcacctgaaggtacaaaactcacaataatagtaaggtagaaaactcactggaaatagaatattataacaccgtaactgtggtgtgcaaactacccttattctaagtagaaagactaaaggatgaaccaatctaaaataataactacaacaactttgcaaaacacattcagtacaaacaatataaatagaaacaacaaaaagttaaaaagtggggggatgaagttaaggtatattatttttattagttttcttttttcttatttgtttatgcaaatgatgctgttatcaggttaaaataatttgttataatatagtatttgcaagactcctagtaacctcaaaccaaaaaacatacagtggacacacaaaaaatattatatcaccagagaaaatcaccttcactagagaaagataggaaggaaataaggaagaaaaaaaataaagaaaacagaaaacaaataacaaaatggcaggggtaagtccttacttaatgtaaaaatgtaaatgaactaaactcttcaatcaaaagaatagactggatgaatggatgagataaataagacccattgatctgttgcctacaagaagcacacttcacctataaaaacacaaatagagtgaaaataaagagatagaaaaagatatttcatgccaatggaaaccaaaaaagagcaggagtcactttgcttatatcagtcaaaatagacttcaaaacaaaaactataagaagagacaaagaaattcactatataatgataaaggagtcaatccagcaagaggatgtaacaatcttaaatatatatgcactcagcactggaggactcagatatataaaggaaatattattagagctaaagagatagataggccccaatacaataataaccagatacttcaacaccccactttcagcattggacagatcttccagacagaaaataaacaaagaaacatcagacttaattggctctatagaccaaatggatctaatggatatttacagaatagtttcacctaatagctgcagaatacacattcttttctttagcacatggattattctgaaggatagaccatattttaggtcacaaaacaagtctaaaaacattccaaaaaattgcaatcatatcaagcgtcttctatgaccacagtggaataaaactagaaataaataacatgaggaattttggaaactatacaaatatatcaaagttaaacaacatcctcctgaatcaccagtgggaaaatgaagcaataaagaagagatttgaaaacatttttgaaacaaatgataatggaaacacaacttaccatacctatgggatacagaaaaagcagtactaagagagaagtttgtagctataagtgcccacatcaaaaaagagaaaaaaacttcaaacgaacaatctaatggtgcatcttagaaattagaaaagcaaggacaaaccaaactcaaaattagtagaaaaaaatgcgtagtaaagatcagagcagaaaaaaatgaaattgaaattaaaaaaaaaacagtgaaaaaaaatttgtttttttgaaaagttaaacaaaattgacaaacttcagccagattgagaaaaaaaagagagaaaatccaaataaataaaatcagaaatttaaaaagagacattaaactgatattgcagaaattccaaagatcattagtggctactttgagcaactatatgccaataacttaaaaaatctagaagaagtggacaaattcctagacatatacaacctgcctagattgaatcaggaagaaattcaaaacctggttagaccaataacaagtaacaggatcaaagttgtaataaaaatggacaaatgggataacatcaagctaaaaaatcttctgtaaagaaaaagataatcaacagagtgaagagacaactcacagaatgggagaaaatatttacaaactacccacttgacaagagattaataagcagaatatataaggagctcaaacaactctatgtgaaaaaatctaataatccagtcaaaagatgagcaaaaaatatgtatagacttttctcaaaagaagacaaacgaatggcaaccaggcatatggaaacgtgttcaacatcattgatcatcatagaaatgcaaagtaaaactataatgagatatcatctcatcccaattaaaatgatttatatacaaaagacaggcaataaaaaatgctggagagggtatggagaaaagggaacccttgtacattgatggtgggaatgtacattagtacaacaaccatggagaacagttcagaggttcttataaaacttaaaattaagctgtcatatgatccagtaatctcaccactggacatatatccgaaagaatggaaatcagcatatttgagagatagctgcactcctatgtttgttgtagcactgtttacaatagctaagatctggaagcaacctaagtgtccatcaacagacaagtggataaagaaaatgtggtacatatacacgatgaagtactattcagtcatataaaagaatgagatccagccattttcaacaacatggatggaactgggcatcattatgttaaggtcatccaaactggaaattaagaagtcaaattatccttgtttgctgatgatatgatcttatatttggaaaaatctaaagacttcccaggaaaactgttagaactcatcaactgattacagatttatttcacaaacgtaatgatctccagttccatccatgttgttacaaatgactggatcttacatgataaacatcacatgttctcacttatttgtgggatttaaaaatcaaaacaattgaactcatggacaccaagtagaaggatggttaccagtggctgggaaaggtaatggagggttggggggaggtgggcatgattaatgagtacaaaatcagttacaaagaatgaataagacctacttttaatagcacaagagggtgactatactcaataatcacttaattgtacattttaaaataacttgaatagtgtaactagattgtttctaactcaaaggataaatcctggaagggatggaaaccccactttccatgatgtgtttatgtcacattgtatgcttgtatcaaaacaactcatgtaccccataaatatatacacctactatgtactcaaaaacattaaaataaaaactaataaaaaaagcttcaaaaaacaggctgactttcttggtaggggcaaatgcagctgatggctttaaattgaagcctatgctcatttaccattctgaagtatttagggcccttgagaattatgccaaatctacgctgcctgtcctgtagaaatggaacaacaaagcctgaatgacagcacgtctgtttatagcctggtttcctgagtatgttgagtccacagctgagacttaagcagctgagactgcttagaaaaaaaaaattatttcataatattacctctcattgaccatgtatcaggtcacccaagagctctgatggagacgtacaaggggattaatgatgttttcatgcctattaacacaacatccattctgcagcccatggatcaaaaagacattttatattcgattattcttgtttaagaaatacattttgtaagattatagctgccacagatactgattcctctgatggatctgggaaaagtaaattgaaaacctcctggacagaatttatcattgtagatgcctttaattgtaattatgtaattacaattgtaattacatttgtaattcatgggaggaagtcaaaatatctacattaacaggcatttggaagaagttgactccagccttcactgatgactttgagggatcaggacttcaagggaagacaaaactacatatgtggcagaaatagcaagttagttagaatcagaggtgaagcctaaagatgtgactgaattgcttaaatctaatgataaccttgaatgaatgagaagttctttttatagatgatcaaagaaagttgcttttattttttttcattgtttaggacagggtgttgctgtcacccaggctactgtgcagtggcaagacatagctcattgcagcctagaactcctgaacttaaacaatccctccacctcaaccttccaagtggctgggcctacatgtatgcaccacaatacccagctaacttttcttattattattactcttagtttgtagaaacagggacccactgtgttgcccagtctggtctcaaattcctggctttaagtaatctgcctcagcctcccaaagggctgggattaaagatgtgagccgccacacccaggtagagaattggtttttgagatggaatttactcctgatgaagatgctctaaatattgatgaaattacaacaaagaatttaaaattttatttcaacttagttgttaaaaaagtagcagggtttggcagggttgaatccaatgctgaaataatttctactgtgaggaaaatgatatcaaaaacagcatcatattctacagaggaatctttcctgaaaggaagattcagtccagcaaacttcatgactgtcttattttaagtaattgccacagctacctcaattctcagtatccacagccctgatcagttaggagccattaacatcaaggaccagactctccgtcgaaaaaatattacaactcactgcacgctcagataattgttagcatttattttcaacaatttttttttttttttgagacggagtcttgctccgtcatcaagctggagtccactggtgtgatctcagctcactgcaacctccacctcttgggttaaaggattctcctgcctcagcttcccgagtagctgggagtacaggcacgtgccaccatgcccagctaatttttttgtatttttattagagacagggtttcaccatgttggccaggatggtctcgatctcctgatctcataattcgcctgccttggcctcccaaagtgctgggattacaggcaaacaaaatatttttaaattaacgtatattcattgcttttgtaagacataatgctatgggacacttgatggactataatatagcataaacataacgtttatatggactggaaaactgagaagtttatgtgacttactttattgcaatgtttactttattgctgtggtctggaactgaacctgcaatatctcttaggtatttctgtaattttataattacagtatttccttttttctccctttatcctactcatagatgcctgccttatattgtttatgtattcaaggcccataaataatttattttcccatcaaatgttatacattttatagaaaaaaaagaatgtagaaactaaacaagtatgttaaaactgttaaaaaataagatttagttttttcaggcatgttttatcattttagagaaatcagttctgagcaacatataccagatagtttcatattataaggggagtagatacacacacatacatatgtatatatacacatatatatttacacatacatatatgcatgtatatatataaacaaattaaggtatataacatatattttaaatttttcccttgttaacttaaatttcaatatttcttcagtgttgtcaaatattaaaccacagtaatttttatgttaatcactcaagtagagataatgtaaagaaatagaagatttgaaagacattcatgaagagagggagagggaagaagcttgccctacaagatattgggaaattgtatatctatagtatctgatatggtttgactctgtgtccctgcccaaatctcatctccagttgtaatcctcacatgtcaagagaggaaggtgattggatcatgggggcactttaccccatgctgttctcgtgatagtgagtgagttctcacatctcatggttttgtatttggaagttccttcttttttttcttttccatgttgccttgtaaataaggtgcctgcttccccttccaccataattgtaaatttcctgagtccaccccagccatgcagaattgtgagtcaattcaaccacctttgtttgtaaacatgtccagaacatgtcacagactttcccagcagcccctcccatcacaggcccagaggggtagaagggaaaaatcgttttgtgggcagggcccagggccctgctgctgtgttcagcctcaggacttggtgctctatatcccagctgctccagctccagccatgactaaaaggggccatggcacagctcaggccattgcttcagagggtgcaaaccccaagccttgatggctttcacatgatgacggcctgtgggtgcacagaagtcaagaattgaggtttggaaaaccctgcctggatttcagaggttatatcgaaacacctggatgtccaggccaaagtttactgcagggacagagtcttcatggagaacctctgctagggcagtgtagaagggaaatatggggttggagcccccacacagagcactacctagtggagctgtgagaagagggctactgtcctccaaaccccagaatgatagatccactgacagcttgccctgtgggcctggaaaagccacaggcactcaatgtcagtccatgaaggagctgcccaagatcttgggagcccaccccttgcatcagcatgtcccagatgtgagacatagagtcaaaggtgatcattttggtgccgtaaggtttaatgactgcttcactgaattttggacttgcatggggcctgtagccccctttgttttggccaatttctcccatttagaatggatgtatttgcccaatgcctgtaccccctttgtatcttggaaagagctaacttgttttttattttacaggttcataggcagaagggacttgcctttactcagatgagactttggacttggactattgagttaatgctggactgagttaagactttgggggactgttaggaaggcaagattggttttgaaatgtgaaaagacatgagatttgggaggggccagtgtcagaatgatatggtttggctctgtgtccccacccaaatctcctcttgcactgtaatccccacgtgttgagggagggacctgtaatccctatgtgttgagggagagaggtgattggatcatggaggcagtttcccccatgctgttctcatgatagtcagttagttcttatgagatctgatggttttacaagtggaagttcctccttcattctttttcctgctcccttgtgaagaaggtgcctgcttccccttctgccatgattgtaagtttcttgaggcctccccagccatgaggaactgtgagccaattaaacctcatttgtttatattaataaattacccagtctcaaatatttctttatagcagtgtgacaacagactaatacagatccaagacagtgtgcatagggatgaaaatagttcagtgaaacacaaaagagagtagtcaaaaagacactgtcatatatgagcatctgcagtatgacatagacagaagtttatgttgctgaagaacatatactgttcatgaatgagacagagaaaacaagtttacccaccagattggaaaaaaaagtaaatggtattacaatctcaattgttgatggtatgtggaacaatgggagtatgcacacactgctgagaataaattggtattgcatttagaaaatcaatttggcattacattatctcataaaattaaatggacacatactttattatccagcaatagcatttcttggaagatagtcttgtacagagaaagccatgtactatctgtattgtccacaataaaaaaagaaataataaccagggaataacatgggaaaatgactatcatttgtaaaataaatattgacttagagtatattcaaacaatgcaaaattaattaatgtataatttgggatatttagctactagatagaagtataatgttaataagcacggcattaaacaacatagaattagaaatattagagtctactaaaaagaaggagcacaaatgtgattcaaggttcatttaatgcttcatttcttaaaaaatttggcagaacacagccatttatttcatatatatatatatttaaaacattccatctttagtgtgcaagaaaacaaatagaaataaaacactatgaaaactgggatatcaactgcctgtgaagctaaaatcatgtaaaggtcaaatagaatttttaatttaaggaaattttaagataatggaaaaatggaggtgatctaaattattttataaagaagatattattataatgattttattccattaaatcaaatataatttttaaatgaatagtacatacttgtggtacgtgttcaaagcttcaaatgaattttaatataattgtattaataattttttaaaaaacaagaggacgctcagcatcctacattattatggaaaagagagagttgaaatagagtccacggttattatgaggcattattttcttccaatcagcaaatggagaaaccgccttttaattaacccttttaattagaagcataatttttcaattcacccacccgtatggtgcagccgaacccttgacttcatttctagatggaggaaattgcagtggctcatttgttgtgacagactgtcccgtcttaaactacaaacaatattggttaatttatttatcaagaataatacatgtttatctagagtttacctaccatatcagttaatgtatttcaacatatatttacaaaatatatcattatatcccctcaaatataaaggcaatctttctaccgaattaaaatgaaaactagaatgtggtgtgactagtacatactaacagatagtgtgcagcaagtataattttaagaaaaatatttctattgaggaataaaacatgaacacccttttgtcattcccaaaccactgtatataaatacatacagtgatacatataatacatataaatccacatatgtattcatatacatatatgtatatgtataatatgtatttatatatatttattcagatcaaatgggttgaagtgaattattaattgtatttcattatattggtatttattggcagtcataaattaatagactaattgtattcagatactaatatttaattttttatgtaatcacaatggaaatagagtttattctctttttatttcttagagcatgcaatagttttggaaacattataaaattttgacgttattaagctaaagcaaagataacattatgcaaaattcatctgaaaagttaattaaataatggcaatagagatttaccaagtagcttattgggattcaatcaggctggtgggaaaaatattagagacagttatagagatagacacaaatcttctcggaaggccgagaagtttgcgtaactttggtagtagacctggctgaaggcggcctggtccctttacctttagttaaacaaattaaagtagtagcaaaggaaggcagagtagtttacctagctagcttgtttactcatgtgatcttaagactaacctttgatgtaccgcaggtgctgaagtgctttttactcaagaagtccacaatgtcaattattaccctctaatggtgttgactcaagcctttgttaattaatcatactgaataaatgcgagtctcactaggtgatcagggccgagtcccaactgtttagaggactctgctggagtctgtaagccattcgaacactcagcaggactggcaaagcagagtatctgtgtgccagtgtacttcattcatctgtcgtgggtcagaggtatgcaagggacagactccctgcagctggtgctcccgtataaggagcactgccacactagcctataagtccaaaccaatgtatttaaaaactaagagaaatatattttaaaagatttatcagagacatactttcctctttgcctaacaagaacttagaacagataaataatgcctcttgaaatctatgtttccattctttttcctttaatacttgagtgtcataaaaatgaactggatttcatattttttttagaagacaggcttgaagaagggcatttcactggaagcactattacttatacaacttaaagagcaatgcaatcatggtaagtggaagattcaaaaaagaaagccatatccctttcctcatttttggagcacgttataataatataacctctagtttgttctttcctcttgattgttttcttcagtgtcacttctccgaattctttcactgataatctctgtaacctcattaggagttctgctgctgcttcattttacttgatgatagttattttatttctcttagatattacttttcaactagactgtaagccctgggagaaacatccctgatttaggatgatctctcagttctcctgccctcatggtgtggcccacccattgacttcatttctagagggaagaaattgtggtggctcatttgtgagagactgtttcatcttaaactacaaacaatatcagttaatttatttattaggaataatacatgtttatctagagttttccttccccattagttggcatattatcatagatatttacctatgaatgtgactatatgcacttaaatataatagcaattttccaactgaagaagggtttaaacagaaatctggggttagtagaactttgtgcaacaagaagtttaattttaagaaaatgatttatttgagtcataatgcattgtttccctttcagtatctcctaatcacaatgaaatatgtatttatagagaagaaataggctgaactatatgttaggcactcttaagatttagaggaccagaaaatgggttatgtctcgtcagacttcagctgagcgttaaggaacagatagtagattcagtattacaagagaatggaaaacagcctgctgaaaatgaaatcaagggtagaggaagcaggactaatttaagagaggagaaccagataaagatcttaatttaagtaaaaagaagattttctgttattaattcagtctaaaaatatttttgacatcaccttctttttgggagaggattctccatgcctccttctgtttttgaacatcttgcaagcagaggtactgacagcttttttttccagactgtattttcaaagatgtctatatagtgaaacttcctaaaagatacagatagtgtctttctctagagcgaagagatttgtttgctggacacaagtaaaaaagttggttttcctctgaggcaaatgttgggcaggtttgagtgtatcgcctgatagaagattggcattttctgaaactgaaattctttgtatttgagaaaaacattgcaagggcttcatccagccagaccaatctgaatcattgtcatgagacccgagaggcacagagagcaagagcaaacatgaaactcatggcatctgttttgctttgaattaaaaaacaacaacaaaaaatcacttttatatctgatgtctgatgcaggggacttgggttagctctgaaagaagaataaaatctcagcctatgtagtttgtgacacctactatgtagcaggcatatttttaggcattagagaacatgagtgaataaaatagaaaatgatttctgctttactaaaatttgcactctagggatgcaaaattgtaatttctagggttaaaaaatttaaaaaaataattaaaataaataaaatacaaagtaagtaaatatttaaaatcttaacaaaacaaaattaagcctggggccaaattttgtatatggtagttgcctgagaaaatgtaacagtgggctaaggctggaaagatgctctttagtacacaacgatggtaaatacattatgagtgcagtctaaaatgaataaattagtgtatattttgtagccgactagagaccccttgtaggctcatattttgaaattattggtcataatgaagataaaaaaatggtgatcatttgtgtttcagggaaagtggtgtaattacaattgtagcattcactgtagaaaggggctaatataacattttaaaaataattgttagtctgaagttgacggaatcaggaaactagacagcgtagccacgaagataaaactctggtcttgaaaatgagtagtatagaaactgataacatgaatgagagaggaaaacttatcaagaaggaacttcccttctagtttaggcaccttgagtttgagatgacagaaagaccaccaagtgtaagggctcatgagacagttgaaaatttggcccattaattcagaaaaaaatttaaatatgaggcaagattttggaatcattcctgtggtgtagatttctaacactttgagactagataagctctaaaagatggtgcaaaaatggaagaacagatgactaatgacctaatgctgaaccacactcactgtcagagatgtataaaacaaccaactcaacagaaatagaagaggagaaagagagcaggaaggggaaaagaaaattcaagatagtacagatctctgaataccaggagaggtgagagcatcagcaaagagggcatgaccacattgcagagtgacaaaaagattttagctccagagaagaaagtataggtgaccttcaattttgtaaaaatagaggttacagaattcatagataagaaaacaagatagttttaaaacaattattttaaatattatctatgcttgttaatttttttaaattaatattataattctctattttaattgtttgaatgatagaaataatgtttgatatataaagatgtttgatatataaagtaacattgaagcaaaatttattcttctgtatgtgtaatgttccaatgttaaaactaataataatagtatttaactataagtttctttattttcaacaagtcctttatttgttatcattgctgagtttggcagaatatttatgatgttctttcattcgttcagcttaaatgaataagtggataaaatgatgagatcactcagtatgagcagggactatcacactggaatagcaatacaaatatttggtatctttgggaaaaaatctatttccacttcaatttttagatttttgatatagggataataataaaactggctataaacttatctaaaattgtataattgatttataagcaagtgggaaaaaaaagagaccgggagaatataatttaaagtttcaggactatctaaatagttgggaggaattcttcgctgtattgtttggtttagcatcaccaccttactatatgaagcagtaacataaaaatgtatatgtttatctaaagtacatgtaaatccccaagtctctatctctccaacctaattctgtctaggtttatgaataacctctgagttcattagaaactactgatgtgtgcaaaataatttgatagttcataacttcatatttgtgaaaaaatattgtaaattctattagatttgatgccacttttatgtggctaacaccttttgcatcaactggaatgaaaattaaaatgcagtggtttgttagaattctaatttttacaacttcttgaaaaggcttcagtagactattatatgctccgtgttggagaaaagaaaacaaaataacagtacagattatttactgtgatttatgccaccagggtgacatcataagcctggtaaaaacttagccatttcaccttcatctctttttaatttttattttcatatttttgtgagaaatgattatgtacagaaaagaagaatagcactaagaaaacagcagaaggatattccaaaactctatttaaagcaaagataacaaaaataggtcaacatacacatgctaccacttacagcttacaagttagcataaaatttcaaggactgtcaatcaattctggatgtaaactattgccctatggtggcagtaagaaatataactcctgaattttatttctgtgaagatggagatggatgcagtaagaaatataactgctgaattttatttctgtgaagatggagatggatgctttatgtattattaggactaaaatgctagattttgaagcatgtgacaccacttaaaactaaaatattctaacaaactacaaactcccaataaattgggagttgagtatattctaagcactatctttgtgtgcaggtttttatttaattcttaaaatatctccatatccttggtattattatcacaatgtctaaatgaaaagaaagaaagaagggaaggataaaaaatgagggaagggataggcttaacagcatacaaaagaatcatggcataattgcaatataattcgttacatgaattaaaaatgcatattaattattcctggttgtatgttgcctaaaatatcactgttaactgtaatacacaatgtaagcaaatgcatatgtctatgttttttaagaattatagtgaacattctcatgtaaactccaacattaattggaaaatcctattttttaataaaaataggttttattcttgtatgatgtaaattataagtactttttttctctaccattactttcctcaatactaacctcatttcaacaaatacctgtattttccttccctttcatcagttacatatttcaactatagacagctagagtatataatgaacaaatataaatcagtttatgcttgaactgagacactttgtatgataagaagcaattttgttttcatttcattaaaataatatagataataatcaatataaacaagcttggtcagtactgaaatatccttccatgtcactcacttaggtttgctcagtcacagtgatctttccaaactttaaatcaaagattatcttttatgcatcaccactgtcacaggtatgcatgtacttaattcttaaatctccatactgtaacctagtattattttacaaccaatttatgtttgatagtctgacttaaaaaaaaattataaccatgtgtcaacattgggaattacaactgaatatgagatgagattttgatgggaacaaaaatccaaaccataccattccaccccagccattcccaaatctcatgtcctcttcacatttcaaaatacagtcatgtcttcccaacattccccctaagtcttagcttattttagcattaactgaaaagtccacagtcgaaagtctaatctgacacaaggcaagtcccttctgcctatgagcctgtgaaaccaaaaacaagttagttacctggaggtatagtcattgggtaaatacttctcttcaaaaaggagaaattggccaaaagaaaggggctacaagccccatgcaagtccaaaactcaaaagggcagtcattaaacctcaaagctcaataatctcctttgattttatgtctcacagccagggcaccctggtgcaagaggcaggttcccaaggtcttagacagcagagctctatggctttgtagggttatgtctcctgcagctgctttcataggctggcattgagtgcctgcagcttttccaggctcagaatacaagttaccagtggatctacatttccggggtctggaggacttagctctcttctcacagctccacaaggctgttccaaagtggggattctatgtgggggctctaactccacatttcccctcagcagtgccttactaggggatttccatgagggttctgccccacagaggcttctgtttggacatccagtgttttccatagatcatctgaaatctaaacaaaggcccccaagccttaactcttccattttgcacacctgcagacttaccctgacatagaagccaccaaggcttacagcttgcaccctccaaagcagtgacccaagctgtacctggaccccttttagccacagcaggagctagagtggctggaattcagggagcattttatgcagttgcacagggcagcaggaccctgggcctggcccagcaaaccattcagtcctcctaggcctccaggtatgtgatgagaggggctgctgcaaaggtctctgaaatgccttcaaggccttctccccattgtctcatcttggctaacagcacttgccttcctttcagttatgtaaatttctgcagccagtttgcattgctcccctgaaaatggacttttcttttctaccacatggccaggctgcaaattttccaaacttttatactctgcttcccttttaaatataagtactagtttcaggtcattgcttatgcttatgaaacaggttgctagaagcagccaggccacatcttgaaatcttttagaagtttcttccaccagataccctgaatcatcactctcaagttcaaagtttcacaaatccctagagcaggggcataatgcagtcaagttctttgctaagacatagcaaaagtgacctttactttagttccaataagttactcatttccatctgagacctcctcagcttgaccacctctgtccatatcattatcagcattttagtcacaaccattcaacaagatttttaggaagttccaaaccttccctcatcttcctgtattcttctgagccctccacactcttccaacctctgcctgttacccagttctaaagctgcttccacattttcaggtatctttatagcaatgcccacttctctgtaccaattttctgtattagtccattcttgcattgctataaggaaatacctgacactgagaggtttaattggttcatggttccgtatggctgtacagaaagcatgatgctggcatctactcctcttctggggagatcttaaacaacttataatcatgatggaaagcaaagtggaagcaagatgtctcatacagtatgagcaagagaaagagagagggggtggagatgccacacacttttaaacaaccagatttcatgataactctatcatgagcacagcaccaaaaggatggtgccaaatcattcatgaaggatccaccctcatgattcaatcacctcccaccagaccccacctccaacatttaggattacaatttaacatgagatttggaaggggcaacagatccaaaccatatcaccatattacaaataccttgaaaacaatacatattcaataagtatttgttattgaatttccaagtattttgcttagagagtgtattcattcttgcattgctataaattacttgataattactgggtaatttataaaggaaaaaggtctaactggctcaaagttccacaggctgtacagaaagcatggccggggaggcctcaggaaacttacaatcatggtgtgaagaggaaggaagcacatcttaggtggtgagagcaggagaaagagagtgaagggggaggtgctacacacttttaaacaaccagatctcatgagaactctatcacaagacagcactaggaggatggtgctaaatctttaaaaactacaccatgatccaatcacctcccaccgggccccacctccaacactgaggattacaatttaacatgagatttcggtgggaacagagccaaaccatttcagagaggaaacgaacaccactcacccgccactgttgctacttctacttgctttttattttatgaaactagaggaatatttcagcctctaattgaactgagacatcccaaagaatatcagaagtataataataaaaattttgaaatactcctaagtttcttatgttgtatatgcaaattactattccttttggatttaattctatcatataatttatttattgcactaccccattaccttccaatgggctaatcagatgatttggcacttcttacatgtaaactcagtatttctttgtaaacaaagccaacaaaacatatagtgtattagaaacccctgatgtaaatgttttcattgacattcttttttttatttttatttatttccattttattttggtatcagagtcaagtttttctcctactcttagatccagtcaggcttccattgcataaacaggccctaagcagtgtgaattcattagtttttttttttaaactataaataggtatctttctctcttatgttaacttctaaaatattttaatagttctattcatatgctataggtacattattgttacataatttgatgaattggattttctatctctgtgtttcttatttcatagttgtaaatgccaaatagttttttatttataccagaggactgcacattttgctgtgctgacatatatctcttttggattacaaatatatttgagcatgactcactgaggagcaagagcaacttatagaaggaagacaaaacaaagcagagtatatggtgatatcaaggaaagcatatgaaacataaagattcaccaaagtaatcagaagagaaaagaggagagatactagaaggctatgtacacaaggaaaagacaaagaggaaggttaccctaagggaaaggaagaacgataaaagttggagaaattatatatttatgtaagatctccaaaaaggactcttaatgtttctgctaataaccaacatttattacatatcatccaaattcaactcaaatttacatgatcccatttaaaacagatcttcaataatgaataagtgagtttcaatataattaactcaagagctttaagttaagaagtttttatgtatcttctgctgattgacacgtctcatgaaaataatgaatgtgtaccaggaatgcctcataagtctgttgattttttttaaactcaaggtgtcatcagagtaaagtttagttttttttttttaagaagtagtttgactctagataatcttttattttttgtttgtaatagtctaaaagcagaacagaccaccttgagccaactgtgagccacaagggacctatcagaatctattagtagcaatcactatttcaaatttgagaagagtgatcagtttttacattttaagtgcatataatttatatgtcaagagatgaattgaaagagaatattctttatccactataaaataaataaaataagggaatgtgggttagtgtgttctttataaaagctaaacatttaaattaacctttccatttcaaataagactaatgtttgaaagcttgcatttttaatgatgctaccaaaaatgtaatagcgtctcagctacatcacacctagcgcatttaatttcagccaatctcattatggatggatagaggtaagaggtttatggaagtgactgcctgaatcggccttaaagaaacaaaatgcaaatttacacaagtaaaatctcagcacacatatatggaaaaatgcaactctaaaactcggtacctgaatttaatgccaacatgattgccaactcttcctggtatttttaaaaggatcgatgttaggtccatgtaaaaaaaaaaatagtcaaataagggttttctcagtcaacttagcatttcctcgtcccttcctacggtaggtaacaattgtgaaaaagcacatgcatagtcaatacataaacagaaaatcatcatttcactctatgtttatatacagagacatacatggtggggacatcatgtaatccggttctaacattgtcatttaaatcgcgtaacattaatcgcttctcggccttttggctaagaccgaacgtagtatctgttcttatccgtgaatccagtagcattcactgagacatttggctcagatctgacatcttatggtcaatcttctatttgctacagcaattttcctactcaaactatgaggtctcttcaaatcccactctttgcctatgtctccctaacttagggatcttttgatttcaggtaacagaataattattaaaaagagagttaaagaagagaggtttacttttacgtttaataataagttcaggaggccgagtgtggtggttcgcgtctgcattcccagcactttggggggccaaggggagtggatcccttgagtgcagaagttggacaccagcttagacaatgtggcgaaaacccttctctacaaaagatacaaaaattagccaggcatggtggtcagcacctgtagaaacagttactagataggctgaggtgggagaattgcttcagcccatgaggctgaggctgcagtgagccattagcatgacactgcactccagcctaggtgacagagccagatgctgtcaaaagaaaaaaaaaagtagtataggagcaactcgttctacaattaactcattaaaatgacaatgtcaaggctctgggtgacttcactgttctggtcgtctccttgtgtctacgagttggatgttatagtttcaaatattatctaatctcataatgataggacctgaagagcctctaccgtgaggacatgattaagacacaataagttatgtttaataagtatcccatagtcttttatctattatacaccactacagatgtattattttacctatttctctaaaacatgaaattacttattaggaaaatgtaaaagtaaaaatcacacagaaagacctcataagtcctatgaaaatggccaaagttggaaatacagaccttgaaaaaaatgaacacagatatatgcaaaaagtgggggagagaacactcatacttaaaggcttatagaataaatgtttttcatagtagcccaaatgacataacccaaatatccatccatcaacaggacgagacaaaggataaattgagttatatacaaatacatttgtgcacatgtaccctaaaacttaaagtataataaaaaataaaataaaataaaaaataaaattgagacttaccatttgaaaaaaaaaaaggaattagaggacaagtctattccaaatatactaagtaacatttatgaaaatcttatgtaacccaattctgagcaatgtatgattcccttttctctttcgtaaaactaaatgaaagctaaaaaaaaaaatacattggaatactactgaatcatcaaaggcggggaaacactacttacttactttatttccaacaacctgggtgattctaaacaacatctgagcaaaaattgctagaggcaaaaaaaaaaaaatacatgctgcatgattttatccatgggaagtaaaaaggtaggattgaaaaacaaataatacttggttaggggattgtgaaagtaaagattgactgggaaaaggcgtaagaggtctttccatctgagatgatctaactcatatatctgataccagggtgggtcattcaggtatgtgcaaatataaaaaagtgatgtctcactatgttgcccaggctgaccttgaacacttaggctcaagcaatcctcctgcctcagccccccaagtagctgggattacaggcatgaccctacctggctgtaaatttcaccctaactacggtaatgtaaatatacatacacacacagacacacacacacgcactcatatagctacagaactgtaattttcctaaagatattctatgcatttttttgacattagacatacgttggttgaggtaggctgtaaacaatatcttgtgttacctaaagtaaaacagggagtttcaatatgagtcaaaaaaaaaaaagttaagggctatacaaaagtttttcctgcaaacaaaatggaaaatgtctctgaacttcagtgttatttcagatctgctgcaggatatgcagaaagctttccgccatcttagctaataactaacaacttatcatatctaacaaaagctacctgccgtgggtacaatttgttcataaatatttttgataattcatgtttttattctattaaattgtattcattggacattttgtcctattgtaattaacagatatgaatatgtaattaggataggaaaacattagtgagcaacccatgattaaacttaaacaatccacaatataacgtgaaaagtgactgattttgataccagaattgtcttcctattatcaatctgtatcatattataattgcttcatgtaacaaaattttaaaataaaaattgaggtaacttcaaaaattaattcaacattatattaacaatatagaaacttgatttatttgtataatacttagacatattttagcaaaggtttatctatggttgagggagacacagtatttttagacaactttagaaaacaagaaagtaatccatttataatgattctcactactaaatcaaatgcttatattgttctacctgtaaagtatatactgtctcattttaacaacttgcctttaatttaatgagcctgtatacatttaattgaaaagtacataacattttttccatacacataatagttttttaaaaaagaaagtctagataaaatccactatgactcaaattctttctccctcctcattgcagtattttcacatttgttctctatttttctttcagtttcaaacaattaatccatatgaagattaaacatagaaacatgatgaaagattatagagagaagcaaaataactttaaagacaataaaatcagataatttaattaatgtactttattaaatatatgacttgttttaaatttaccttctcattttaagagaataaaaataaacatgttctcaaattctccaaaaatatttaatccaaaatatttttctctgcttcatttatcaatgtaccttaaacaagcgtaacatttattttatcagtgtgtaggagtagttatctattgtctaatggtgttattaaaaagatccataattttcttagaaaaatcatccactaggtgatatccttacatgttcttgtaacattttgtaagattttaaacaaatatttcatatagaatttattatactatatttatgtcacctatttacttttatattttttctactaaattacaaagttcctaaatctaggaactatagctctttcattactgtattatcaataacataggtaataatgtaactgcccaacgggttcattttgcccactatccagacagaaattgcagtggaaaaagagtaattcatgcagagccagctgaacaagaggccagagttttattatgactcaaatcagtctccctgaaaattcagagtggggtttttaagaataatttggtgggcaggggatcgggaagtggggagtgctgattggttggtttgatttatagggagccaaagctgatctcttgcattgagtcagtcctttcctggacggggaccatgagaccaggtgagccagtttatcgatcttggtggtgccagcttatccatcaattgcagggcctgaaaaatatttccggcaccagtcttaggttttccaacagtggtgttttccctaggagatattggggaagtttgcaatcttgaggtctctatcttcatgactcctaaaccgtaatttctaatcttgtggctaacttgttagtcttacaaaggtagtctgatcctcaggcaagaagggggattgtttcagaaaggggatggtatcatctttgtttcaaagttaaacaataaactaagttcctctcaaagtcagtctggcatacacccaggaataaacaaggacagctcggaggttagaagcaagatggggttggttaggttagatctctgtcactgtcataattttctcactgttataacttttgcaaaggcagtttcaatagccaataaatctttggtgattaggaagtatcctttactcaaaacattttctagtcaccaaaattttctttttttaacttaatttggtaatcttagttcaaatattatcaatttttatttgagttcacgtttgctagtttataaaataaataacctgaaagtttaaagtactgtcagttttgtagtgcttttctttcttctaacatacttctttttctaacatcttgaggtaaataaaaacagaagtaaaaatggacatctttaataagtatatggtgatggaggaaaaaaaggatcttttcaaatatgtataaatttggggagaagcggcttttgtaaggctaatttactgagttagaaagttgagggtacacagtaactgggggaaacagaagtttgtgatggagaaataggagattaccaaagatgaacatcttctacttgatatttttcccaggaaatgggaggctgttctcatttccttctacctcttttacttcttgactgactcactacatatatatgtagatttgtttcctcatatccatttgtttttcattttttacaatgaagctcagtccaaattctagctactatacatgctttaatattgtaaaagaggatacataaatctaaactcccacaaagattgttaaaagtatgcgtgtttcaataccacattttcaaatttaatgtggtatttctttcagggcttccctgaaactgattttcatatctggctgctcattcctatagcctagagagattttaaaatacacagagtcacacatctgtgtatatatttaaagcactcccggtgattcgaacgcatagctatagaaggagctactgccgaatattgactaaaacaattgatgcgcttagtgaaccttccatatataacagataatgtcttcaaaatcaggcaagaaaatgatgtgttagaatattttccatatataagctgagatacaagtgtttaccatgtttacccaaaaagaagagtaaaaatatcaatttccaagatgaatgtgccagaaaagacagaaaattacctttgaaatgcattgtttgcttccttctttttttttttttttctttttttgtttgagacagaacctcactctgtctcccaggctggagtgcagtggtgcgatctcagctcactgcaacctccgcctcccaggttcaagtgattctcctgcctcaacctcctgagtagcggggattacagtggcacaccaccacgcccagctaatttttaatttttagtagagatggggtttcaccatgttggccaggatggtctcaatctcttgaccttgtgatccacccacctttgcctcccaaagtgctaggattacaggcgtgagccactgtgccaggccttgcttcctctttttttaaaaaagtttacttttaaaatcaaagatattatatttgccctcttccctctctattttttcttctgccataacacagcacaggagctaccagaccaacaatctatttttacttttctatttgtagaatcctttaaaagaaagcatgacccataagaaaagtggtacttaatgtggcacagcaattcttttaataaatgcaatacttgtgttcagtaacttaaatttgaaaaataagttttattttgaaatgtcttaaataggaaattaatttgttaagtttaagttccaaaaaaacagaaatcagtaagaaaaaactgcttataataatgaatgcaacactgaaatgcatgtatctatctatctatatatacacacacacaaacacacatatatatatatttaatttaatatacacttttgttttccacagggaaaaggtgattgatatctcagtttggcctagaaagttatttttttatgtcctattctgggaaaagaccaagccagaccggtttacctcagaaataggtaatatatgtatcttagcggaatatctaagatgaccttaattggtgctggtttgcaatgtgattcgtgcttctttatacattatacaaaaattgtttagttttctaggaaacatactgtctcaatagtttgattttattttctataaagaaattatgaattccagaaaatttcaggttttaaagacatttctgaacttaggttgagaccacctgcttacctcaggaaatattgacttttaggacaaacagattcacataatctatgagccactgtttcaggaagcttctgcttctctggctttccatttccctgtggagagtcttcatctcaagtaacacacctgcctctctcttacctctcagcctctgctctctctaggaggtgacccgtggtgagcttgagaagaagaaaaaaatctgagcacatctggttctctcctctactctttaaaattttatctggctgaaaaaagaatacattctggtttatcctttaagataatctcatcagggcagcttctcttcccttgtatacgtgggatagtgtgggtggaaattcatgtaatgaatggggctccggaggagaggtctgaattgtctacctatgccaataacaaggtcaaatacatgtttattcttgtgataaaatactgtcaagctgttttgactgaaatgtaaaacgatgtttaaaattagtttacatataactgagctaacattttgatctctattttctagtcctgtctctaacccttgatttgttctgaaatgtggaaatgaacagataaatcttatttaatggccttcctgagaccttaacattttggcacattaaccattgaagtagatgataaggagtgagatttggggaacagttttatatacagagatacaggatcctagcccatcaccggaggtggttctgaacatatgccttataggtttgagcatggtgagttatagttagtttctactacttgctgatgattttaataattgcttgaatggttttaattgcagggaggcagtatctggatgagcaaataccaactgctttggtaagaatacacaaatctgatttagaccacacctagtcatttgttactcaaacagattcaactataaggaagagagagtgtttatatatctaagcctctaggtatctgtggacttagtttctcagccaggagctcaaaaacacgttccattttggagtttcttacagtatgggcaagtgcattcaaacaagcagcccccaaactgcttattctttatattaatttgaactgtttccggggcctgttttgggctaaatgcttatatcacctcaaaatttgtaggttgtagccctacccccagtgtgatggtaattaggaggtggaatatttgcacggtgattaggttatgaatgtgtgtggtgggggtcatggtggaattagtggccttatgaaaagtggaaaacacatcagagcccactctcccaactttcactaaagaaaggtcatatgagcatacagtgagaagtcggccaactggaagccaggaagagatacctcaccagagcctgaccatgttggcacactgcactttggatttccagcctccagaactgcagtgagaaaataaatatctattgtttaagacacctactctatgtcagtttgttatagtagcacaaggaggctaacacagggccaaaagaaggaactgtgaataagctagcctcctgggtccatgtgactttttggtaggcgacagactgttctctagttaactaactacataaactctgaatatggctttaagaagcagacatcaaaactctttcatcacccatgaaagggaaaggtcacacattttataagcagaaaaaaaaattaaagaaatagagcatgtgatattatttagttgaagtacacaaataacttgttgaaattactgtaaattaaagacttaaacattttcagacatatctataataatgtgaaaatcagttttgctcaagaaattaagaaaatcttggggtaatttgaataaaaaagttgattattaaggtcaaaaatgaaagaaagaaataataaaattaaaataaaatactgttgtatactattcacttggcttaaatgaagatatctgagcatgtatagtgttggaatggctgtggataaagaattttcacaaattactgttgaatgtgtcaatcgataaaactactttgaaaccaacaacttggatttatattgtaagattaaacagatatataaagatacatatatctatatatgtatatatgaatctatatatatagacagatcttatgatacaataatttcatacttctgtttacccaagagaatcttttttatatataaatcttttttatatatataaaagtttatatataatttgtataaatgcatatatatctttaatatgcctatatatgtttgtgtatatatatgcctggagccatttaaagaatatggttcctgattgttataatgatatactcaatatgttcaaactaaccaagacactaatccaatggagaatgagtaaacatattacaaaaaagtcacacaattaaatatcacacaagagtaaaaatgaagggactatgtaaataaatataggtaacaaatactgagtcaagaaagccagtcccagaagaccataggggacaattttatataaaattcaaatataagtaaaatattacattttaggtaaatatatatagagagagataaaacatacagaaagatgtgataaaccccaaagtcaaagtaggaattaattctatcagtgataaaatagagaagtgctaaaaaaaattgtttaatgatacttaaatcatcaggctggctttattcaggaccattgtaataggtatagagataactgcaatgggattttccagtgggaaagagagattgggcttaactccgaatacagcatggggaagtgggaatttatagccaaggagcagggtgggggttagtggatagaaaatcactaacaggaaacatcgggaataagggggattctggctaaacagaccttaaggattttgatgtcacttgagagatggtagagaatgacaaatctgatcagatattgagggtgatctgatatcaaagatagaaggttcttggtaaactgacttagcagggttctttgctaaaactggattttacaaggaggttcatagactggcctataagaaagtgcaggagcatgactaaagcttggccaaagactcctttgtcattaggaatgtacggataggagttgttggcattcactactccttatctttggcaatgtgttcgtggatgttcatcatattattaaaataaatattttaaaataaattaataataaaagcccccacatgaagttaatgtgtaataaattaaataattttaatcagttcaggtttttgcacttgaatgccaaaaagtaggcgtttcagtaaacttataaacaaaaagaaaccaaaaaaaaggaagagttgcaattagctaggcagaagttggatgaagcaatgataaatgaggagtgttccacatgaagagaacatttgactaaaaaataggcagggtgctgtggcttacgcctgcaatcccagcactttgggaggccgaggcgggcggatcacaaggtcaggatattgagaacatcttgaccaacatggagaaacccatctctactaaaaatacaaaagttagccaggtgtggtggtgggcacctgtagtcccagctgctctggaggctgagtcaggagaatcacttgaacccgggaggtggaggttgcagtgagccgagatcgtgccaatacactccagcttgggcgacaagagcaaaactctgtctcaaaaaataataataataataaataaataaataaataataattcacaacacatgcctcagcttctgtgtgtcagacactaccttatatacattatatatatcacatacattatacacatacattatatgtatacattatatatattatatggataatatgtataaacacacccacacatatataaactcacacttctcgcaacaaccttttcttcattttacctaagcaaattttcacatagaaaggtcacataactaggaaatggaaaagtacatgcacttcaccaatacaccattttgtgagtgccagaatgtgcaatggaagaaagtcctagccaaggaacaaagaaaaagtagaaggaaagaaagtactaatacccagaaaattgtgctagccctccacaaagacacaaatgagaaacagattcaaatctaaaaccttgaccaaactctctctcctaaaataattaggcaaggaacagaagacgagcaaaagagaaagataagagtctgccccctgtcttagtcagttcaggctgctaaaacaaaatatcataaaatggatttcttctaaacaaaagacatttacttctcacagttctggaagctgcaagtctgagatcagagtgccagtatagtcagattctggtgaagaacctattctgggttcaaactatcaacttctccttacatcctcttatggtggagggagcgagccgactctcttgggtctctttcacaggggcactaatcccatttatgaggactccacactcatgatctgaccacctcctaaaggcctcacctcctaataccatcatcattgaggttaagatttcaacatatgaaatgtcaaaacatgttttggggagaacataactatgctctccgtaatatctcctgacttcagataaatattgctgtcacagaagcacagatactcagtccctcaaaacttcaacattcagcaatggccatgctttacaaaaaactagtttttggaaaagggtgcatgcaagggtattaaagctccctcttcaatctcccagaggctcagactccaggagcctcagttcaggaaaccgcagaggcagtttcttcaaaattgcttaatttttacatatttgtagatatcccacattttctctctgttattgatttctgatttgatttcattgtggttggggaagatactttgtatgatttcagtcctcttaattttagtgggacttattttatgacttactatatgtcctatcatggagaataatccatgtgtaccagagaaacaaatattttgaaataagtagggtttctagggtaagcagtttcatacgaagactcagagacaaagcctaaaataccaactctcaagagaccagaggacaggagtgctgtgtcactcaacaaagccacatccactgaagaccaaggaccaggagtacagggctccatggggaagggcaacttagaaagttttggatttgctgcagatttgttgacttttcaagagggcactgatgtattcggtccctctctctgacagagaagacaccccctctcctacttgataactgaatgatgccatagttactacctgatgtgcagttccttcaaatagagaggaagtacactggccacaatctctgaacaacagacatagaggactggcttacaggggaagctaaatttttcactttatcatggagcactaaacctctgctattgtatttggcaacagaaatgaggatcaagattaaacaatgagtgctgagtctcaatccatttggggaacctgctatagtagcggaggtttcggtaatttttaaacgtaatgcataaagattgattctgagaagatattgtgtgttgcactcttaaagatactaaaaatgaagcatgctaagcacttagtttgaaccaacagaacatctgaactagggaaggaaccagggccaacaagctttactggctttggatggctccatggaagacacaaaagattctacaattattgaattaaccacaaatctaccaaggccgtggctactatttggaaagcaatttcatgacaagtggaaaccaagtgctctgacattatgctggtttctgcaaagggagattgccacattctgatgaatcataggttggttattaaacccaatgcattaaaaaagaaaccctggggaataataagagatatcaccatttccatggcttcaagttgccattgcagggattcccattaataattttcatgatctctttcctcacttccccctgcccgagggtaatatctttggctctacatccactaatttcagtaagttgaaagtacagtcaccttactggtacctaaagcaatagtgttgtcacactcaattcttaacttcaattcttaactcaattcttaactcaattcttaaccaatcatggtcacactcaattcttaacttctaaattaatatttttaacctcattctttgagcaacacaatattaaaattaccatatgatccagcaatttcacttctgggtatataaccaaaagaatcggaagcagggacacaaacatatatttgcatctcatgtcattgcaccagcattcacaatagcccaaaagtggacacaacctaagtatctctctatggatacatggataaacaagacatgatacatatatgtagaatagaatagaatattattctgccttaaaatagaaggataggattttggcacatggtacaacatggaagaacctagttctaagtgaacttaggggttagggaaagaagcaagtcacaaaagaacaaatactttatgattttattcatatgatgtacttaatatagtcaaattcagagagccagaatgtagaatggtggttgccaggatctggacatggggaagcaggcaatggggagttattgtttaatgggataaaagtttcagttttggaagatgaaaaacattctggaggtggatggaggtgatgactgtacagcaatataaatctacttaatgcccctgaaccatacacttgaaaatgattaaagttataaatttcattatgcgtatttcaccagaaaagttaatttaaaaaatcttattgtataatgctattctagaatattaatattatgcttgcaacactgctctaaaatcatgtgtttgaagcttctgttgctaacttctgcatgttcatccaagtgcagtggttttcttaatagatctttcaccgaagatgctttttgatgggtaagtccttgggactttattgtctttttttcttaatcacagctacttaagcaaggaaaaaatgaaatttatttgatttgtgtgtttattttctgtaatcagcataatcaaataatttgcacattaaaatatttctgctgagttaacttcttaaagtactttcaagtgtaagtctagatgatttacgcctaagtataaatgaaataaatacgctccttggaaattgtctcgtgttttactcttcatacaagttttacttcaaaatatacatgtatttctctgaccagaattgggtttcaacaataataaaaccaatacagtcaaataaactgcagtgtctttcaaaacaaatccacaggttaggcaactaccaaaagattagtttgggccgggcgcggtggctcacgcctctaatctcagcactttgggaggccgaggcgggcagatcaccaggtcaggagatcgagaccaccctggctaacacggtgaaaccccgtctctactaaaaatacaaaaaaaaaaaaaaattagccgggcatggtggcgggtgccggtagtcccgctactagggaggctgaggcaggagaatggtgtgaacccgggaggcggagcttgcagtgagccgagattgcgccactgcactccagcctgggcgacagagcgagactccatctcaaaaaaaaaaaaaaaaaaaaaaagattaatttgatgagaacaaaactaaaccaagaacatgtcaaattaattattaataagagtagtaaataaaatttagtttttttaacctcatgaaagctttgaagtgaacaaaggaagatgtttgatagaatgaaatgttgcacactccaaaaccacattataactttataagcattatttctgtgtctgtatgtatttatgtgtaatggtgtatgtgtgtgtatccatccttgaaatttaatcccaagttacaatctttctttttttctttacagctgaagagcattgaccaagttattatcttcaactctctcaaagggtgaagagagaaaagcaacactgagtcaactggctggtttttcatccctttctcttcttcagttgtgggctggagagagatgtaattccaggacattggccagccttttgttatgtggatacgctttacacaactacagtttatccatcagaatgaaatacagacaaaagctgaggaaatcagtcttcttaatagatagaaagtgatcctttctgcctccaaataaaactgaattataacattcttcgtatttctctgggtacacatctggtttaaaaattagaagttaaattttaaaagtaggcagaagtttgtatttagagaaagacattttaactgtaatagtgatcattattttaatgcttataaagtccaatcaaagataaatgtcaaaccataactgaatatattgtgtgctgtgtgagagatgaaatacatagagaaaatccactttaaatggtaaaaaaaaagaaaaaatatattatggcttttttctagggaatattctgtaaagagaatggcaaagctgtgcattgaagagccaacttcaaaaaggtgaataaatagtggaatatttttatttgttttctgcttttttcaaccaatgtttcactgagtatgattaataataccatttgctactagtagaagactgaattggttgggtgcatctgtggctcataccagtgtaatcctagtgttttgggaggccaagacaggaggattgcttgagggcagaagtttcagaccagcctaggcaacatagtgagaccttgtctctacaaaaaattaaaaaaaaaacaagcttggagtcttggcacaggcatgtaatccttgcttctccggaggctaaggtgggaagattgcttgatcccaggagtttgaggctgcagtgagctgtgaccacaccactgcactattaagcaaaggtaatcaaaaagtttgagagtttgcatatatcaagaactttatgatatcatatttaatattcatattagtattctaatatagataatattatttcccttttccaatgaacaacaacagcaaactaacacaagaacagaaaaccaaacaccgcatgttctcactcataagtgggagtcgaatgatgagaacacatggacacagggaggggaacatcacaccagggcctgttgggggtcgggggcaaggggagggatagcattaggagaaatacctaatgtagatgatgggttgatgggtgcagcaaaccaccatggcacgtgtatacctatgtaacaaacctccatagtcctgcacatgtactccagaacttaaagtacaataataaaaaaaaagaggctccataatttgcaagaggtatataacttaatattcacacaaactgctggctttatttactggctctgatccccctcctgaaagaataaggttaaaaaaatgctgtaggatatgtatttgatgaagtaacgtttggctacgatactgaattcagctgggaaaaggtacaggaaaaatgtatgcgaaactaagagatttcagaatactggtcgaaggtctctgtttgttgaagttttggtcttagctaaattgtggctaagcaagcagtaatgcatgggagttcaattgaggttaaaaaggaccatatgggtcaatgccggggagcttaaagacaattcctttgagaacctgtgtgactaggaacctggattcacacagttaatagaaaaacagaactttgtaggaatttgttgagaaaagtgaaattagatcatatggggactgtgaagttatgtaaatcaaaggcactgtctgagggctctgccatctgcaggtcatgttgaccttcctggccaggggctctcattatgtatatatgttgtgaacaggttttgagcgttctgctggaaaagggtttgaggaaaactaactcctcccaatgtttacagtcatatgagaggccgaaaagttgtaaaagatgatgaaagaaataaatctagtaggaaggcagaagttttaaaaagtctctgaagaaatagaagagaatcaaggtcgttgtcaggatgtaagatgtggtagaaagagggacgtggtgcccagatgcctcttcaaggaagatcttgctgctcagctctaaggagtgcagtcagaagtatttcccccttctattacctggtgttggctcttattaaatgtcattcataccaaattctatctcagaatttgcttctggaagatccaatctgaaaaatataaagttgttaaatcaaagcctgtgtttcaaaaaaggaacaaaaagaaaagataatatgtttccactagagagatgcagtgtctacataggctctaaaatgaaggtcaatcttgaaaaaataatgaaatctccatttgtgtatgaagatctcagaaaacctttagtcctcatcaatggagaaaacaatgaaactggaaagagaagactaaatctagtcttctagattctatcatttgcttagttaaataaacttgagaaagtcacttgttatcagtgagccccaatttcttatttggcaaaatagtccactacatagctaatcagagtgcatgctttcttcttcctttgggcatttattattgctgcaatatcctttgtaagttgtactagaatatcctagcaactagaagaaaggataagtatacaataaataattgagatgtattatatacaagatatgactttttgaagcacctgatcagtaacacttctgctgtatttcagaaaaataaagctgctccccaaattccttaattttacatttaataattttgacatatttttgaagaacttcttgtataaattaactttttttggtaattgaatttaggtcactgggacagaataggattcatttagaaagcaagagaaaacattccttacctccatgcaaattttttgaaaatcccatgagaattcttcttttaagttatgtatgatgggtcactcacattatgatgatgctttcaagcttcatgaataaaactgactattccttgcttttcccttccagtgtattaggactgcaattacttttgcaccaacctaatacatgagcatttttagatgtttctctcagatagactatgaaacccccaaaacaatgactacttgggctctgtatccccagaagtttccaagtgtttgatgtatactaaagacaaaaaatatatataataataaactggttatgagtgacttaggtatatactgcaataaacatgttcaaattgttcttagctgagttacttattttctaagatggcaagagagaatggaggattattctctgttcttacactaaccataaaatgatcatgagtagtttagaccagtaacaacggttcattacatatttgtgcaaatactgtattctacttctaccacattcccacagtgtgatcttgtaaaacctttatgaacttcaaggactttgacattgcaatgagtgtagtaactcctacctaaaaatgtagttttaaagaataaataagataacgaatgcaaagtcttaatgtggtatctggctactgttagtataccacagcaatttttttttccttactatccatggcccaaaaagagctgcctcatgtggtgagtttcctccaaagtattagaagatagtatagctaccaatatcgctttattgatcaaatcttggatttgagattgtaactcttaaataaagagttcattcaggctctcagaatcaggcaacgtattaatattatgatgtttgtcacatcatgggagctagaatatggacttctgcacaattcatgcacccattttcttattaagactcataaaataaaaagaagtatatagcctaatgtaatattgatggtggtggcagcccatctgtagcagctgctgccataatgcctgctgcagtgagggaggtttggccagggctgtctactctgtggagcctgtgggagccaggaacaggcaggagccatgccaccttctgagttaaaggggcaggatccctgccctcctgggagcagccatagctgcccagctgcagctgcagacccaggcattcttgtggtctctggggcccaggaagttcccttgcccccagtctcggaagtgcctgctcctgttgcctggcctctccctgcacctggtgtccactccagttttggagcaaagtggtggccgagcccaggcactgttgctacctggtcggtgtatactcacttggggcagtgctaactctccagccccctgctgcctcagacccttctcaactttgggcttcaacaagcacaggagggaagtcaagtgggggcagagtacagttcagcacgggcctacagaaggccctcagcactaacagccggggcaccatgggcaccatagatggcaggttgatggtggcaggaggcaaacaggcttctgggaagaaaggggtgggtcctggtgaagccccaacttcaagacagagacagcctgaagcctgggggctgggctgccagttctgtggaccagagtgagaacttatgatgctgtttttgggcccacctatagttgcccatggaccaatcagcatgcattttcttccctctgaagcccataaaaaccctggactcagccagacttggacaatgcgatgacctgtctgcagattggagctattaactgtgggtgtcctctctgctgagggctctgcagatgatgggatgacctgcctgcagaatggagctacccactctgggtctcctctccactgaggaccgcacagaaattgtgactaccagtttcaggaaggagctacactctccagatctcctgagaactgttctgccactcagtgaagttcctctctgacttgcttaccctccagttgtctgcatatctcattcttcctggatgtgagacaagaacttgggacccactgaatggtggggctaaaaaagctgtaacacaaacaaggctgaaacatgctccctgctcaccacattgcgggcaatgagaaggcgagaagagctgaggccctttgtgaagcccagacctaggggctccccaagccagagctgtgacattctctttgaggctttgtagttcttggaatatccaagcctctggcgccaccatgttctccttgtccagccatgggtgtcctcagtggaagtcacatgcaatacatatggcccagccacggccatgcatggagctggcacttgtgctcatacctggaactgcctgccctgccgcagcagtcagagtgccttgctgtgtgcagtggctggaccccacgctcattcacccacacacccctctccactctgtgcctggctcgcacttggcagatgtgggatctggactggtaatgggaactgagcttagcctgtcgggccaagtgggtgggatgagcccactgggcatgagcaatacttaggcagaaggtgcagctggccacagaggtttccagctggagaagcggcaccctatgtatcctgtgacaatctttcccttcctctgttcacttttaactcccttctaacaaagtgattagcaagtcttccaccacaaagttagattataattcaggaatgccttcaagtttctcattttcttgctgtgtactcatttcttcctccatcaatagtgaatcagagattccatttccccatctgaaattataagactaactttacaggaatttgtgggaattaaatgagttcaaggttcttaataaactagaaataatttattccatctgtatgtctaatactattatattattactgggactttattacttactattactttattacttactattgattttatttacctacactttccagctatatgaaacagaaataaaattaaattacataaattctatatgccagcatgagaagaagcaatgtataatagcaacagaaaatcatattaaaaataaaatatctccattcatatagtcatatcttcctttattgtgcttcacttcattgtgttttgcagatattgcagctttttacaaattgaaggtttgtggcaaccctgcatgcaaccagtctgttggcatcattttgtgttatattttggtaattctctcaatatttcagactgtttcattatcattatatctgttatggtgttgtataatcagtgacctttgatgttactattgtaattgttttagagtgccaaggtctgtgccccaaaaaaggtggctaacatattcagtaaataaaatccagatagaccaaagccttttgtgccaaacagttaaacacattgtgaacaaaaagaaaagttattgagggaaattaaaagtgctactccagtgaatacacgaataataggaaagcaaaactgccttttttgctgatataagagggtttgagtgatctggggagaatatcaaaccagccacatcatttccataatctaaagcttaatcatgagcatgactcactcttccattccatgaatgctgagagaagtaaaaaaaaactgcagaggaaaggttggaagctagcagaggttggtttatgaggattaaagtaagaagccatctctgtaacataaaagtgcaaggtgaagcagcaaacactggtgtagaagctgcagcaagttgttcaaaagatctagctaggataattgattaagatggccaatctaaaaaataaactttcaacgtagatgaaacagccttctattacaagagaatgccatcgaggactcttgtagctagaaagaagtcaatttcctggcttcaaagctttaaagaaatggctggctctcttgttagggttgaatgcagctgataactaagttgaagccaatgcttattgaccattccaaaaattcttggacctttaagaattatactaattattaaatggaacaacaaaatctagatgacagcatatctgtttacatcatggcttactgaatattttaaacccactgttgagaactattgctcaggataaaagatttctgtcaaaatattactgttcattggcaatgcagccagtcatcaagaactctaatggagatgtacaaatttaatgttgtttcatgcctgctaacacaacatccattttgcagcccttgggccaaggagtaatttcaaatttcaagtcttattatttaacaaatacattatgtaacgctataattgctataggtagtgatttctctgatggatctgggcaaagtacattgaaaatcttctgaaaataatctaccattctagatatcattaaaaacacttgtgattcatgggaagagagcagaatatcaacattaggaggagtttggaagaagttgattcctgctcttatggatgtccttcaggggtttaagattttagtggaggaaagaaatacagatgcggtgaacacagtgagagaactagaattagaagtgaaacctgaagatgtgactgaattactgcaatctcaggataacaatttaatcactgaggaattgcttcttatgaatgagccacaaaaatgtttctttgagatggaatctactcctggtgaagatgctgtgaacattgctgaacatgatgcatttagaatattacacaacttatttgataagcagtggtaggatttgagaggattgactccagtgttgaaaaaagttctactatgggtaaaatgccatcaaacagcgtggcattttacaaaaaaaaaacccaaggaaaaaaaacagtcaatcgatgcagctgacttcattgttgtcttattgtatgaaattgccacagccaccccaaccctcagcaactaccatcttgatcagccagcagccactgaaatccagtcaaaagcttccctcaacaaaaagactatgacttgctgaaggctcagacaatagcatattttagtaacaagtatttttgaattaagtactttttttactattgacaaagtagtaaaaatgtagtggtagactacattatagtgcaaatataacctttatatgaactggaaaacaaaaaataaatgagtgagtcactttattgcaatatttgttttatggtggtgatctgaaatagaacctacaatatctctgaggtatgcctgtgccactgcacaactattagaatggtcaaaatccagaatacacgtaacactactgctggagagcatgcagggcaacgggaaatctcattcatcgatgatgggaatgcactggtatagccactttggaaaacaattcggcagcttcttacagaagtaatcatactcttaacttacgatccagaaattgagctcccttaatatacccaaaagaatttaaaataggtatatgcacaccaaaatctgcactctgatgtttacataatgataacaactttattcataattgccaaaacttggaagcaaccaagatgttcttctgtagataaatggataagtaaatttccttacaaacgaacaataaaatactattcagcactaaaagaaatgtgctatcaagccatgaaaatatagaggagtaacttaggtacttatcgctaaacaaaataagtccgtttgaaaaggctacctaccatataattctaacaataagacattttggaaaaagcaaaactgtggagacaggagaaagatcaggaatttgtaaggttggagagaagggagggatgaataggtagatcacagaggatttttaagacagtgaaactactctccatgattaaaaagaaaaaagtggtggaaaaatgtcattataaattgttccaaacccacagaatgcacaattccaagaatgaaccctaatgtaaagtacagattttgagtgataatgatgtgtcaatataggttcattaattgtaacaattgtagcactctgttgagggatgttgttaagggcggagaccctgtgtgtgtggaagcagggaatatatgggaaatctttaccttcctctccaacttgaatcacaagcaattatgcatgaaatttgagaacataaagagaatataaagtcacattatgatacctcctgccaattgcagatataatgaacatgaaatgtccaatattaaatttgtttttgaatgtcttttatttggatattgttttgcatttcctctactccatttaagccaaacttccttgcaggtaagttcttctaagttcttctacatattagacttaaaccttatatcaattctgtcttctaaaataaaacatagaataagtcaatatccaaaagaaaaaagcaaaaaaagccatgtttatattttaagatagtagcttttctttttagacatttccattgtattctcttctaccatctatgtacccaaatatttgtttaggttgatttttaatgaaatgcaaaataatacaatatgacttacctcccaatatgtacaactcaacaaaataataactcaacaaaaaatccagaacatactcttcaattatgattaattttttttttttttttttttttttttttttgagacagagtctcgctgtgttgccaggctggagtgcagtggcacgatctcggcttactgcaacctccgcttcctgggttcaagcgattctgctgcctcagcctcccgagtagctgggactacagccgcccgccaccacgcccagctaatttttgtatttttagtagagacgtggtttcaccatgttggccagggtggtctcggcctggcgctgtggctcatgtctgtaatctcagcattttgggaggccgaggggggcagatcacgaggtgaaaatattttttaaacaagggcgtgaggaccaactggcagaaattgtgcagtgaaaatttctacatgagacatgagttaaaacttagtaaaatcttcaaagcgctttctttttcttatactattcaaaaaatttttttcaactttatggattgtaacacgtatattaatacctgcaatatacagatactgtataaaatatatagacgtgtttggttttatttacaaaatttggttggtaattagtttattcatcaacaaatcgattaacaaggagaacaaaaaggaaaagttgtttagctatctatctttatttattcgttatctgtaaattataaacagttcaaagcctacggaatctttctttaataaatcatgcatatatttttgaagaggtttgattgatggaaacataatggatgtacatatttgtggggtacctgtgataatttgaaaaatgcatataatcaaatcaggataattgagatatccgtcaccttaaatatttatcttttctttacgctagaaacattcaaattattctcctttagctattctgaaatgtacaattgattattgttaaatatagtcatgctactgactcgttgactaaaaaggttgaacaaaataccaaataaaaatatgaaataaccagaagcatggatttctttaaaatctggttattcagtaaactttacttttattgcttttacggttgccttatctgcatcttgtatggcagcattttattaatgactcactttttaagagtaaactatgcatttaactttaatagaatatattactcttttacaagcagttttcattagtttatcaaactattcatttaaattaaatcagaaattacaacaagtatcaccatcaaggccatgaaaaatgttgattaatcctaatagttgtttcagtttagtctgattgagagacctcttctaatctgtagatagtaccatgtgtaacatctacattggtgatttattaatgggctatatttttgtataaaagaaatactctcctatttgtaatagatgtaagtcttcattattttatttttacacaattcactatgagatcatggttttaatggttctcccataattaaataagactttacagaggagacatttttctgtagcagtaaataacattttttaaaaagagtagtgaatcttcctaaaagtttcttccccaagaagacacagaacgtacgtccatactaatattctcagtgattccacctcatagacattattattcccatattacagatgaggaaattgaaggcttattcactaaaagctcccctgaaataatttgtgtgagcatttttcctataaagcaaatggaatattttcatgacctcattattgaaaataataaatgtaaatttcctttttaggtttatgttctctattcttgagctatccttatcatgttcaatcctgtctcccctttatctctgaaagaccactgtcccattagtcaggatcaactgtaataaactgtctttaatctctatgggcttgcatcagttaagttatattacttagattaaaattgtgtccttattcatgcaatacatgtagatttttttccagaaatgattgttattttcaagtattatacatgttttattttctctgaaataacatatttatgatattttgacaaaaaattgaaagatataaatagtaaatgaaaatatattatttacactgatcttaaaaatacatttcaaagtaagaagatatattattcgcactgtacaagtgaacagccttaaaagatggtgtagtttactagaaagaacataagactgattatgaaactttttggattctgttcctaattctgctgttgcttagctttggtgaggtttaaaatatagtcaactcttcacttacttcttgcatatgaactaaattaaatgattcccctcccgcccatatggtagtatttctgcacagatgcagttagtattacatgctgtgcaaaatcccagctgtaaactgaaaacagggctttcatttattttctattgtttttaagtagatttttctgaaaataggtttaaaaagcaaatgaaaaacggaaaacagaaacaatgcatcggttaggtccacaattagtgatggaagatagaaaggactagaaacaaaaaggaacaatatgacgatatttaagtaaaaagtatgttcaatatggggaaaattcacatttgtaagcttcttaaaatacatgttcttcaaaagaaatgtccttcaaaagaaatactcagtagccacaaatgtcctccaaagttctattgaagaaaataagttattggagaaaattcttatgctccattttattccaaggaatataaaaatctgaaagtgaggtagagaatttacagtagctcacttatatatcaaattgtatttaattaaagccacgggcaattctgttttaatacgaagttctaatacaggtatgtttaacataaattgtttgctacaatttaagacttcttatgatacatttttgtctagaatgttctttgattccagattcttatagcttctaagtagagaagcagatttacaattcttcaagctaaaagcccacttgaatatttggaaagattcagcattgaggtgtatgtgtatacataataggtaaaaacagcaatatgtttgattgtgcatgttaactttctaaaataatgtgtataaaaactatagaattcagcatcatttttatgataaaatcatttttaaatatctgtatgtaggtaactagtttagcactggttacagtctaactgtctctacctctctctgttagttgaagtcacctaggtaagtgtccagagtaatttttactagtggcaaatactctggattgcagagtgttaagacactttattcagcttgaagtattccatcagtatgtaataatgcaactttgatgaaaagaataagatttccaaaaagttcatatccctttcagttcagcctcttaactttaccataatagtaaataacttcaggcaaaattccaacaaacaaggtgtgacctttgctgtgtagtctcatcagtctcataagtaattctctttaaaatagatatagatattttgtatcatgtgatatatcttacaaggcaatttattccttaagagatcttagttatatttatattgcccacatttcccagaggaagaatcttacatatccttgccaatgttcagcatccttacatcaaataatggacaagtatttcaagtatataaaatatgtatagaaaatttcattcaaaagaaaaatttcaactaattttagttatacctcagccacaaagatggaaaaaatattctaagtaacaaaaggcatgctgtatatcactgaattgcattacgtttacagaaagttttatgaggtaatgatttctcttctgattatctatagttgtgtaggcaacgacctcaagagttagtggcacaaaccaaaaacagttaattactttgattgctgatctgcaattccagagggcttgagtgagatagctcctctctgctccatagagagagtatcaactggtatggctagacgtaggctggagaatccacttccaggatggctcacttttatgagcgcagtgtaagccagagttgccagcccaggatcccagcttcactcctaatgagcaccttctcaaagctgcctggggctcatctcagaacctggctgggttttaggagagattattccaaaagacagaaagtgagaattgccactttgctaagacctgaacctagaaactgtcacagcattatctctgacatacactgtccgtcaaagcagttaaaaaaacctcccatattcaagaaaggacatcaactcaactccacctcttggtgtgaagtgtcaaagaatttgtgactagctatacttttccacagctaataaaaaagctaaaaatgacaaatacagatagaaaaaacagtgagttagatttgaaatgttcattcattatagatctttatctggtaaactatctttctaatttgtgcactccaattttatgtgagtatataatttttcaagcatctccaaaatacacatgcatctttgtaaataattgattttaactagtagaaaataatttaattcaaaataattaatataataattactattcacctactcaagtatagctaaattattcagcatttaaatagctactggtttatggtacctaacattcaagtaattataaatatgttaattattatttactaatattagaacctgtaactattataattgtcattacttttaattaacttacttcatcttagactgtcacaaacttaatttgtcattttagtttaataaaataaaaaaaattcaatttaaaatacaattattatttagcccttatgtagcaagacgaaaagttaaccatacattgcttctagaatttaaagtttatggttcttttagttgtttataaaaataagtgtaataacttggcagattaatgtctgactgtcaaaaatactgtggtcagttggtcagccatgattaaagccactttgggtccaaatgggccaaaaggaaatatcgttgaagtatgaaacttttgcagccaacacttactttttggaagggatagatctctgttagctgaatcgtataaatgtcacaatgtccattggtttctttgtggttgttgtttgtgttcctggcctgttcagtgtttgtattctacatgggatacaatcaccaacaaactttatctctttcccactcatgaagctactaaagagataccagggaactgtttccactcacacacatccttatctggcgtgtcctttgtgtcccttatttgctgggacagtggtaaactgcaatgatagcaatttcagccgagtttgagttgtcattcttgctagtctttgaaccctgattaggctttgcagttcacctcacaaactgacagtgctatcaaaggcaagtattccatatttggaacaccagtgaaaaaccaggatgttacaagaaaaaagtttttttttttttttttttttttttgacagagtcttgctctgtcatcaggctggagtgtagtggcatgatctcggctcactgcaacctctgcctcctgggttcaagcaatcctgcatcagcctctcaagcagctgtgactacaggcgcccaccaccacacgcagttaattttttgtatttttagtagagactaggtttcaccatgtgggacaggatggtgttgatccctttacctcatgatccacccacctcggcctcctaaagtgctgggattacaggcatgagccactgtgcccggcctagaaacaagatctcttaagaggtcatatattcataataaaaagggcaaatatcattccctctaatgtcaacactatctctgaaatatatcttctttaatacatagaaaaataatacacttatttgaatgatagacttgacttcttaaagtggaagagatattcagtactggaaactattaagctcacatcttacaaatgaggaaaatgctaagaagtttaggaatcttcttgggtcatgaggttcactgggagcagaataagaattgggacctacgtttctgggtcttcggtatagagcattctttatggttatcacaagttagtattttctactaaaatatgttctcagtataaatagtgtgaaaaagcattttaaatatttgttgtattaacaattgcataaaaaatctcttttattgattaccaatattatccccccgaaagtagtacacattagtttaaaaagcgtggagcaaatatttgggttataaaatagacataaaatagacatataaagtaatagacataaaatagacatataaaataaaataaaatatttgggttatataaaatataaaatatttgggttataaaataggctctggttttgtcatgaaaacatacagcttctgaatataatatgtaaaatatatatcatactcaataggtaatatatatatttattacataaatatagagagactgctatgtccctgctatgaaagcacacaaatgttgattataatatggaatatctcttagtctgtttgtgccgtagtaacaaaatacctgtgactgggtaatttataaagagcagaaatttatttctcacatttctgaaggctgagaagtttaagatcaaggcaccaacatttggtgaaggccttcttgttgcatcctcatgtagtagaaagcagaagcacaaagaagcagatcaatgctacattcttacatggcagaagagaagagggtgaaccatgaacttactcctgcaaggcatttttataagggtcgtaaactatgagtgaggaaagagcctcccagaggtcccatcttccaataccatcactttggtgattaggtttcaagatgagtttcagagaggacaccacattcaaaccaaagcagatatttgtgtgtgtatatatgtgtatgtgtgtgcatgtctgtctattgtgagtatatatatgtataggtgtatatatatatatactcacaatagacagacatgcacacacatacacatatatacacacacatatatttataggtatacatacacacacgcgcacacacacacacacacacacacacatatatatatatatatatatatatatatatatgtaacaatagacagagagagagagattgagtcaagcttaaaattaagaaatgggccaggtgcagtggctcacgcctgtaatcccagcactttgggaggccaaggtgggtgcatcacctgaggtcaggagttccagaccagcctgaccaatatgttgaaaccctgtctctcctaaatataaaaagttagctgggtatggtggcacatgcctgtaatcccagctactggggcaggggtatcacttgaacccgggaggcggagattgcaatgagcggagattgctccattgcagtccagcctggtcaacaagagcaaaactctgtctcaaaataataataataataataatgataataattaagaaatggaaatgttcagcgaatacacaaatgaggtagaagatgtgtggcatatgtgttaggtgtcctaatttgcctggaatgctccagtacatgcctattgtactggcttaattaaaagcaccctttatactctgagatgttttctgggttgggtaaaatgttatctggtcactgtagatatgaggctgtggaaatcaaatgtgctgggcaatgcccatgaattgatggtggagacaaggccacagatcatgacaaaaccgaaagaaataatcctatccatgaatgggaaaggcactgccagtgtggaagttcttcccaggaagcagactgatgggagagattgagttgagagagtgccaactataactaaacagaagcctaatcctgaagcccatggtttctgggtgataaaacatctatctgaaaacctaacgtaaaaattactcagactcaaagtatttctatagggacttctatcagtcttggttccaccaggaaaacaaagtcaatttaataaaatgattggtttaataaatgcattgggtatatgtgtttgtagggagagctggggaacctacagtcagagaaactgtcatcaaatgcaagatacttgtaggcgggagaaaagcaaatgacaaagtattcatgttaagcactaaattaggtggttttcaaaaagttgactggctagttaataactcttaactgtctcctcagccgagcaaaatgagtgcctctcacacgcttatttaaaatctgatgcgatgcttcaatctgcccatgagactggaagaaaataccttctaaatattgcaggagtttttcttaatggtaaactataatctagaagactgtaggaaaaaagattctcgaaaatgaagtttcctgcttctccttgagagtgcagaggacacctcaaaacagtggtgaggttgatgtcaagttgatattagactacccaacacagtctctagcagagatgaatcacactcattccccacaggtacttctacaacccagcgccgcgtgagatttattctaaagacaatgcctttgaagaattgttcacacagaaaattacaaagcacagaaatacttcatttcctctgaaagtgacttagcagaaaaaagggaaaattcacacccacaaatccacacgtatataagccagaaatttattttacaaaaaaaaatagctaaagtattcatagagagaaaggagaactagataatgcacctagaacatttaaacaatgcataaattccagaaaagattaatattgccctttaaattgaaaagggatcaattacagaccaaattagttaagttgttaattacttaattatttggcgaacagatctgaagacattactaagattctatcacagtgaatttaagatgaggattgtgctagccagacagaataaaagtctagatatatgtctaaagggacatcagaggatgagaaaaaaaaaatgagaggctatctttaaatagaaaataaattttctcccaaaatacagaaaaatgtgttctcaaactgcaaaatcacaatgagtttttagtaggaaagtaaagcaatctccactttcagaacatcgtgggtgaagaaatagtacttccattgacttctatgtgtatagatggaattgtggtacttccattgacttctatgtgtatacatggaattgtggtaatatttcaacaatctagatgcatagtaacatctaaagtcctttccaactataccagctatcaattagatctgattaagatgagccttaggtacatacctgaaaattaggaataacctttgattctaactgcatcagagggatgtgttcaatacaaaagcaggcataatattttgtagttaagtaagaaactttagagaaatatgcaaatatgagctgcttgctatctccatcactgatctgaactcttaaggtgtcatcatgtatctttcacttaattattgtttcaaagtttattgaaaatgtttattaatatgaaaaataacatcagaaaataaaacattggaatgtgatgatatttagtggaaaagttgtaagacagtggatagatgaaaaatttaaaaaattctcatttccattaaagcatcctaactatatccaaatgatgtcattgcaggaattaaattgctacaatgagcatacaaattcaaggtcaaaaactgctttcaaatacaagaattactaatgatgaagactaatgattttcagttgttctgacctccttagaattagatctaaacagacaaatcttccagcttcggagacaccgtattaaactgtcacatttcatggctgaactgagctatatagggggaaatatttggaatagtaactgcattaatgtaaacatttacaaaagggtttttttttttttatttaagaaagaagatttggaaaatcaagattaaacacaaagtcttcttgataatggttttataagtcactgtcaatcttaggaaactggcatttatcagtcaatcaatcaataaagtaaggagtagcaaacttcaaattttaaaaatggaagaaggaaagatagaaattgtttttgagtttgttgttttgtttataatttttatattacaaagtgaaaacatattttataaaatatagcatatattatttatagaaaatgtttcaaaaaatcaatgtctataatacagtgatttctcaaaaaacagattaagatcgaattatttcattcaagtatagaatgaattttcataatgaaaacagctgtctgtatgagtacttttatgatacaaagtcatcagtagctttctccccaaagaggtcaaaataaattggcatcacctgaatcaaggttatgacttccttgaggcttatcttctgacagattcattttctataatctttttttttctattagcaactactgtctgggaaatttctgcttcattgtattcccctgtctataaatcaaaaaatgatttaataaatatttgcacttttttaaacagtctgtattcaattaaaattgattcgtgattaaatataaattatagcttttaaatttctggtttacaggtggcagtctagtaagatttaacgatactgtctgactggagctggaaagcagtgagtatggctgctatcggagaggagagagaaaatcaatctctgtgggctgctattatccagaagaaatggagagctcccaatgaccaggcattccaccgagcaacagggcttacttgcctctgctctcattgaaaaccacacagagcatgcaacactttgctcactccaaaactttatgactttcttcaatttcaagcaatgttgaatgctgactcaataagatacaaccaaaacaacttgttgatgagacaaagctgagtttattttttaccatggtaaaagtgaacgctacctcagcagaggggcaagaaatatattttttgagattttgaagtctggtgcaagtttttcaatgtggaacttggttaagatggggctagcgtcataatgtagttgcttagaattgtgaacgcagggaggagagaattttgagaaaagtaattcaaagggtcttgacatataccattcagtaagttgctggaatgaaaaataaagtcatttgcaattgtaatcttcttgggcaagaatttgctgtaatactaaagttaagttgatgaagtcagtggaggaggaaaaacatgctaatgtagacagtaagagctgtgaatgtagatagtctcagctctcagcagggagtcccaacataacaatatcaagactgacaaagcaagactgaagaaagcacacaccataacaaagaaacagcaggctcaatgaagagaaacatttagacataaagaaactgttataagatcagattttaaaataagtatggctttaaacatacatacacatacaaacacagtaacaccataaaataaaaattgaatttttttaaaatgaaaaaagtctcaatacacaggctaaagagtacaatgggaactgttgaaaagcaaactaatgagcaggtgtgtttaattgagctttactctcccaagggaaagggaactggaaagcatgaaggaagaggtaagagacttggggagatcatgtaacccaacacctaaattgaaggaatgctagaaaaaaaatacaaagaaaactgaagagttaatgacatataaattagttatgtctgagcatgtcccaagacagagttaatcatgcatttgtatcctaaccaagtatttgttttaatatagaaagaaaaaaatatttgtgattcacagagtattactctgctactgagaaagccagaaaaaaaatgtagctgcagaagatcccctgaaatcacaccatttgacagtcctagaaagtgcctcttacttatgcaacgtgcagtactttgggtcaggcagggttggtccacccgtggaactgatagatgcaggaggcagataagaggggagtcccctagagcatctccaactggcctgagcactgggagaatggggtggagccactggaagttctctcagcttgtagaggggaggagcttggcctctttagttcctgtgggtggcctggaatcaatctgtgaggtggggggcctgttagcaggactccctcttgctttgctggaagtttttttcttgttttcctctttgcccaataaattccattcccctcacactttgatgtgtctgtgtgcttaacttttcctatttttttcattctatattaaaaacaaattatttagttagtatataaatacatgagtagctctgtcttaggacatgctcagatatgactaatttgtatgtcattgactcctcagttttctttgtattttttttctagcactcttgcaatttggatgttgagttacatgatctcctcaagtctcttaacctcttcctccaagctttccagtcccctttccctttgagagtaaaggggacaagaaccccatttaagctgaactaaggatcaaagttctacaatagaataaatagttctttcttggtaaacatttttttgaggtcacaaatgctgggaacttgatgaaagcttctgagggaccagaaatacttgtgatggaaaagcctgtatcttggcatgtacaacttcttctatttcctggaattctctttgctatgagtagcacaaagtagaccaatggcacatcatttgcctccaaacttttcttagcttgactggacttcaatctggcagcatttctagcttctagcaagcagtctctcctgcccttcccaaactatagctccagtcctttttagtctcctccttcccacctaccccccaaaatctacaaattttctattttacgagtcatttggtggtttagttaataacattttcctaccaaaatccatgttttcttttaccacaaaatatattgttatttaccttttatttccacatctgaatgtaaaattatttgaacaagatactatcaaaatgaatccattttatttaaaaaggtattcatgtttcttcaaagtggttattcagaaaaataagtgccacctgtcaactgctcatcaaaattgacacaagatagtcataatgctattgtggcccaggaaccacaattttatctttgagcagctaagaaaaaaaaaaatctttcagaaatgaccttctattactagctttattctctctttaggctcataaggaccgttaactatattaaaagagcaaagagaagcatcctacctttctctgatacccaccattacagccaggcttcggggatacctgctgcttttatttattatgcttttcagtactaatattaaagtgtctttataaactttatcatagcggttacacactaatgggaatggaggtgctgtattttcatttttttctttataattgtcaaataaaaaaataaatctggactaagtaaggagagactaattggaaggattattgcaagagaggaaaggactattgcaatatgggaggagaattattcaatggaaagaacactgatcattagatctgcaagcatcttaagggctaggcaaaatgcattttgcttttgtagagagaaatgaacaaggtaagaaagaaatgactgtcatcaaagaagagatcagagactattttaccttgagaccaggctattctcaggaaaagctgttaaggaggaattgcatgctgggcaacaaagccctgggaaagaagagaaacttaaccaaatttattgttagtgttgttgtgttgtgttttaaccgtcattttgtgttgattgatcagcagggacaaggagtatagctaataatttatgaagcaaagaatgattatttggagggtcagtatgtttttgcaataggtagcaatggggacatccatgaatctataatctgagtgatttgggaaggatgatttattgcagtagaccttttcagggaacataaaaggtcaggggaattccttaaccttcaatgtttactaggatcacagggttcaggtaaaattcaacattgtcataaagagcattgtagatagtcatcagagatactgaaaattttgtcttgaaattttaaagcaaaatttctactgtcacccaatgaagttagaagtggaacatttagaggttcatttttgagcagaggctggatctggttgttgcatttattgtttctcctatgtggcataagcatacattaaaaaaaaaagaatgttgtctctttgtatgtagacactttaaaactggaagacttctgtccgtacaattagtaatgtttttacagagtacctacaatttgagttttatcaacatagaatggagtattcatatttattttgttttagaaaatagctagaataagtgtcctgagcttctactttctcaaagtataaaaaagagaagataattcctccgaagttatatatagactataattcaaaaacaattatataatatagactataactattctgtaataaaagttccaaagtaatgcacatcagattttgagtgcggcctgacttcagatgctgattctgcagtttattggagtcattttgtcactttggcaagttattaactgctatgtgcctcattttcttcatctgtcaattgattatatcaatgtttactaacttaaataagaataggtggtagaggctagaggtgagactgggctttctctggatctgtgatatgggaaaggttagatgaaattcaatgtctcttcatgaaagaaactctcaacaaattagatacagaagaaatatacctcaacacaataaagcccttattttgcaaacccattcctaacatcacccttaatggggataagttaaaagcttttcctctttgcattcttgtctgaaagaagacaaggatgcccattttcaccacttttgcttaacatagcattgaaagtcctagccagagcaattaggcaagaaaaataaataaaaagcatccagactgaaaacaaggaagtcaacttgtttctacttgcagacatcatgatcttatataagaaaaccctaaagatcccaccgaaaaactgccagaactaataaatttagtaaagttgcaggatacaaaatcaacatgcaaaaatcagtagcatttctgtacatcagttgtgaactatctgaaaaagaaatcaaaaaggcaattccattcacaatagctaccaaaataatcttaaaatacttagaaataaattaatcaaggcagttaaagatctctatgatgaaaactatgaaacaatgatgaaagaaattaaagaggaaaaattctcaaaattgctaatttttaggaaaatgcaaataaaacacaatgagataatgtctcatccctgttagaaaagctattatcaaaaagacaaaaaataacatatcctggcaagcttgtggagaaagagggactctaaaacactgaggtgggaatgtaaattagtatagtcactatggaagacagtatggaggttcccaaaaaaattaaaaatagaaataccatatgatccagcaatccaactgccaggtatatttcaaaaggaaagaaaatcagtatgttgaagttatatctgcactcccatgtttattgtagcaccattcacaataacccagcaatgcaatcagtacaaatgtccatcaacagatgaatggaagaacaaaacgtggtgtaacttcacaacagtattctattcagccataagaaagaatgaaatcctgtcatttgcagccaacatggattagcctgtaggacatacttaaagtgaaaaaagccaggcacagaaagacaaatactacatgattgcactcatgtggaatccaaaaaagcagatcttacagaagtagagagtagaatcatgattactagaggtgaggaagggtagcagggaggagagataggaaaagtcaatcaagagggacaaagttgcagttaagaggaatgaagtatggcattcaatttcgcacagggtgactatagttaataatgataataaattgtatatttaaaatagctagaagagaggatttggaatgtcctcaccatcgagaaatgataaatttctaagataatggatatgctaattatgctaattttattactgtacattatatacatgtatcaaaacatgccactgtataccataaatgtacaattttttttctttttgagacaaagtctcattctgtcgcccaggctggagtgcaatggcatgatctcggctcactgcaacctccgcctccccagttcaaaccattctcctccctcagcctcctgagtagttgggattataggtgcccaccaccacgtctggctaatttttgttttttttttttagtagaaatgcagttttgccatgttggtcaggctggtctcgaactcctgacctcaggtgatccgcccgcctcagcctcccaaagtgccgggatttcaggagtgagccactgtgcccatccccataaatgtacaattattatgtgtcaattaattttaaaaattgagtataggtatgtgaaatgcatttcctgaatgtggattaaagtttcagtaaaaccaaatagcaaaaaataaggaaggcaaaaacactttaatttgacaaattgtcttatgaatgaattctggtaatataaataatcaatacatgatatttctatgtatgaactgactgactttatctggcaaaagtgctacgattttgaatttattcactttctgaactctctccttggtctgccccatataccatataaaacactcttacccttaataatttttttcatagaacaaaaatccaaaaccattctatgcttatttttttaaaccttatagaaatatttcctctaacagtactaaaatacgtgatagatgaagtttcaaaagcaaatcattttcatgttgcacccctacagtttccataataataactgggtcattattcctctgagaactgaaaatgaatgttcataaataattgagtttttaaaagccataataacaagaacttttaaatgtcacatttacttaccaagttcaccttttgttctgccatgtaattttaatatatctttataggtatgtacatgattccattctgtagcattgtctctaaagaagagtagaatttccataactcagccagcaagacaaatctagaggaatctttgagatttttaattgtgtaagaaggcatggtgattcgatgctggggagtttttaatctttatgaacatcctggataataagattacactgcttaataagagtgtcagaaagcagtggggtgaacctataatcatttaagagcaattagcaagaaaatttttgtggcttatttcttccttttatgtctgttttcgtcagggagatttcattactacagtatagcacatctttttggcaccaatgatacgagtctgctaaaaagtaaattgggccataacacacagagaaaatggggctattccagagctccatgcaattatctgagggccctaaggagaacaaattggagcatctgctgctaagggaagaatcagcagctgatgcctacctacatgcagtgaaaaatcaaccaaataatatgagcaaacattttcatagagcatccactctgtaacctcagctcaccttgcgtttaacctggacaaaagctatagagtccaaaaaacccaaatctctgttaaaattgtgtaagacaaagtaataaatttgtgacctagagcccttaatattgtttattttagcaactctgctatttttttctgccttgtcttccaaaaaaagagaacaacaaaataaaataaaatagtaaaagaaaatgcactagaatttatttccccaaagtcattttctctatttaatgcctatgtaggcaacagacacctcctcatcagttgtcatttaaacacatatttattggatgtttatttacaacatactttgtagatagggaaaaatgaaataacgaaaaccaaatcattacattttaagcttaattttttttggtataaattgaaggaatacaagtgcacttttactacatggatatctgatccacagcattactgaattattgttgtagttcctaacaccaatttcaaatgcttaaaacatgtacatacacacacagttgatttttttttcctcttgaatgcataagacagaatttctacgttaaacaatagaattccaactattgtcatttttcagatgagtaatgccaaggttcaaagaggttaagtgaattttcagagttgcaacactaacactacaaaagtctcaggtctagaatacagagactctggttctagaggcatttcattaatattctgtgcttcagggattaaaaatgccaatttcaacaggggcctagcaaataacataagtagaaggctgtgctgagttgaccgagtggtgagctaaagggtattgcccttcaaaagggactgctactcagctcaagccaactggttccatcaggtaaccacctcagcatttccaatacttctgatattttttcaagggaagctaaaagttctcattttaatgtggattctctccattataaatgcagacagctaatttcatattgtgaaaacactacttcaaacacaacaatctgcaaggtgaaattttgctgtagtcaaacactttgcctgaatatgtgggcactttaaatcagaaacagcctgaattctcagcccctaagagaatgcaaagtatctcaacaaggataaagatcagaaatctaaactgtgtgttttctttttccacagacagagtgcccagaaacttaaatcatggtttcagtttagtataagcaataaaatccacactaagaaatgttttctccaatcatccttattgtccttttgatgatgaagaggatgctattaatagtctattttttaaatgaaggtcaagaggtaagtgggtaaattctgcatctacactaagggtactagtgggactacatcaatgcttattaagcattggggtgaggatgttactacaaagagtggcttagggctatgtgtggtggtctttagtttcccagcgtttttctctttgcagtgaaacaactccaaaattaaacatgtatatgcaaactattttatgatagggatatttttgaaatatattttagatactagattaaattttagaatgattttagaagatattagaaattaataagattagatatgttaaaaatactgtgaaaagtaccattttatggttatattcaatgtaagtgaaaaatagtttgcttgagtcaagacagaagcaaagaaaagaatttgtggagacaatgcgaatcatatttaggatgaaaactgcactgggggcaatgcacggtgactcacacctgtaatcccagcactttgggaggccaaggtgggtgaatcacagagtcaagagatagagaccatcctggccaacatggtgaaaccctctctactaaaaagacaaaaattagctgggcgtggtgctgcacagctactcaggagactgaggcaggagaatcacttgaacccaggaggcagaggttgcagtgagccgagatagagccacttcattccagccaggcaacagagggagattccatctcaaaaaaaaaaagaaaagaaaaaaaaacaaaattgcattgggatagctgattcagatataattattatattccttctttaatgactatttttaaataattcaataactaaataaagtagataaaacatgaaccagagattgaaaatgttctccgaaaccaaattaggattaattcacttttgtgcaactgtaggaaaaaatataaatctcacagtagcataaagctggtgggcttattatagaaacaatttcagtccataccactgtcctccacttctatctagacactgtccctaatttccttccttcgtgagactctgttgccagtagggagactaggatagtggaaatacatccatagtcacatactgtttgcatttttagtttccaagaacacatttcttcaaatacaaggaataaaatatattttccacttggaacggccagttaaaacttactgtgcttttcccctacactaaatcatataagtttaatcctaccacaagcacacacctctcctccaaaatagagttgctaagacccaactcacctgtaaaaaatgcctctacttatgaaagaaaagataatcgtcacaggaatacacagagctcaacctttgagcaaggtatcactgtatcagaaatccaactacaacatacattagccctgtgatcttggataattcactgcacctctctgcttcactgcaaaatatcagtgacgacattgccctgcagagttgttgtgggtgtagtagaattctgaggctggattgtgtttctcctagggacttaatgtacctggctacatttaggtctaaagctctttaaaatggctgaatggattaaaaaaataccattatcagtcaaaatatcctactgcaaattatagattaaatgtactacagctaactgaagtagaaaataaaatcattggaaagataatagaaaggtcacagaatggatggaaatctgagagaagcctagaaataaaagctaatcaggagagtggttcagtagtaagaagcaaatccaaggacacaacccagaaataattggttgagaggtcatgtcagtgatattgctgtagaacacctgatattgccattactgacctcatggtgccaccatctctgatgtgcacactcaatttattgagacttggtcagatgcccacatgagattaactggggtcttgtaattctgcagtaagagagcaagaccatgctctcccgaagacttacacaatagaaatactactaaagtaggaagtgtcaaggcagtgcaaaaatagcaaaatttacaacgatgttgtaaaatattataatatctttgtttataaatatatttatataccaaaatatatactaacatagcaactgaatcagttggactataagactgtaaatgagtttacctgttttcagtttgtttgtatctttgtatcttaataaaaataaataattggattaaatgaattataaaagaaaagatgagaatttattgttttagatcattcactcattcttttattcattgatttatttagtaggtgtttattgaatactgtggtttaaaagcaatgtcaaaaactggatggtatatttcaataagcaaagtgactaactctttccctttatgaactacacagttaattagaagataatcttttatacaagttcataaagaaatacacactttgataggaagaaagaccataatttaatctgtgacataaaagatgagacctgaataatacaatatgatttagtttgtatctttgtccccacacaaatctcatgttggattgtaatccccagtgctagaggtggacctggtggggggtgtttgaatcatgaagcagatccctcgtggcttggtggtgtcttcataatagcgtcttctcacaagatctggtaattgaaaactgtgtggcacctcgccgcttctactatgtctctctcttattcctgctttcaccatgtgatgtgtctgctcttgctttgccttctgctatgattgaaaactccctgaggcttcaccagaggctgagcagattctagaactatgcttcctataaagcctgcagaatcatgagccaattaaatctcttttttaaaataaattatccagtctctgatatttctttaaagcaatgcaagaatggcctaatacagagaattggtaccaagcaggggaacattgctataaagataactgaaaatgtggaagcagctttgcagctgggtaatgggcagaggttggaaggatttggagggctcaggagaagaaaaataaatgagggaaagtttggaacttccaagaaactggttaaattgttgtgaacaaaattctaatactgatagacagtgatgtccaggctgccaaggtctcagatggaaatgaaaaaattattgggaactggagcaaaggtcacatatgttaagccttagcaaagagattagttgaactgtgttaatccactagggatctgtgaagttagaacttcagagtgatcacttatggtgcctggtggaagcaatttctaagtagcaaagcattcgagaagtttcctggctgcttctaagatcctaactcagaaataggagcaaagacatgacttaaagtttgaagaatttgtagcctgaccttagggcaaaggaagaataaacttttgtggtggggtggggtgggggagaggaattcaagcagactatggaattaccacttgctagagctatttgcataattaaaagggagccaagtgctaatatccaagataatggggaaaaataacttgaaagcatttcacagaccttcacaggagcccctccttatcacaggcccagaggcctagaagtacagaatggttttgtaggccagggccaggaccctgctatcctgcatagcctcagtacaattctccccacaccttggctactccagctctagccatggttcaaaggggcccaggtacagctctggctgcagctctagagggagcaagctgtaagccatggtggcttccacatcttgttaagcctgtaagtgtgcagaatgcaagagtgaagaatatttggcagcctccatctagatttcagaggatttatgagaaagtctgggtgccaaggaagaagcctgctgcaggatcagagcaagctcttacaaagaacctctaccagggtagtgccaaggggaaatgtagggttggagcactcaagtagtcctcaatggagaactgcctagtggagctgtgagaagaggacctccaatgcctggaaaagccacaggcactcaatgacctgtggaaagcagtgacagtggctgcaccctttaaagccatgggagtaaagcactttgcaagccacatgggcagaactgcccaaggccctgggggctcaccccttgcaccatgtgccttggatataggatatggagtcgaaggaaattattttggagctttgagatttaatgacagccctgctgggttttgcatttgaatggggcctgtagcccctttcttttggccaatttctcccttttggaatgtgaatgtttacctaatgcctatagttttattgtgtcttagaagtaaataactcattttgattctacggacacttaggtgaaaggaactcatctccagaagagagaccttggacttggacttgggtattgggacttttgagttaatactagaatgagttaagactctgggggactgatgggaaggcattattgtgttttgcaatctgagaaggacatgagatttgggatgggccggggcagaatgatatagtttggacatttgtccatgtccaagtctcatgttgaattgtaatctccaatattggaggtagaacctggtgggaggtgtttggatcatggaggcagattgttcatggtttggtgctgtctttgtgataatgagttcttgagagatctgatcatttaaaagtgtgaggcagcccccacccccactttccctcattccagcttttgccatgtgacatatctgatccccactcatcttccaccatgattgaaagctccctgaagcttcatcagaagctgagcaactactagcaccacgctttttgtaaagcctgcagaaccatgagccaattaatcttttatttataaattatccggtatcaggtatttctttatagcaaagcaagaacagcctaaaacacaatagttagctaagaaaattagaggtagaccagtctaggtcaggaagacacactcttgtctgtaaagggccacattgtaaatattttcagccctgcagggcatatgttctttgttgcaacaaccctagtctactgttgctggagaaatgcagccacagagaaaacagacagcaggccagatttggcccatgggcagtagttagctgaccccaagctaggcaaagagcaatttaggtatgtctgaaaaccttgatgcacaaaatctgcatgtgtggtttatgaaaacataccacgttcattcagcactgtgcctgaaactgaaaatatatttaaatttattatctcattcaatccttacaacaatttgattgagtgggtaatattattatttccattttacacacaggaaaatagagccacagaaatattaagaaaattgccaccagttacatatttgtagatgacagtgatgggactcaggcagtttgactccagggaccacacttgtaagagatgttccaaagaaaataaagctgtaattctagttgaaatactaaattctctattaattttgaataattgagattattacactacttctttctacccagaaacacatttccttgcagttgtttgtgtcttattttatatgtttccatattactttatagatttcttcgtatgggacttaaaatttttattttttattttagtgttttaaaattctgttacagtttttatcactaatataaagcaactatttatttgcactttcaatttaaatgtttactgcaaaataagtttaattgttgatttcaataaaatgtttatatttttccaatatttaggatattatttgctattctattttgtcactttagctttcttttaaacattttaatttgcttagtttttgagaatgtgtgctgtagtttatcatttttgtagcaattattactagaatcataccttcttaactcctttaaaacttagattaaataaataatgttgatttgctaactataaaatagcattgcctttctataataaatctttttcgtcatagtgcaccattatttcaatacatcattgttgttataaacatgattttatttgggatacattgcttcttctctttctcttttctctagctcatatttatcctagtttcaaaatacatactttatttgttatttttctttgatcattaagaaaaattattgatttttaaaaattttattaaaggttcccatttttccttaccttgctctcttcatccaattcagacttttttatatgaaaaaaaattaaaagaaatgaaagaaccagattacctgaaaaataattttcccaacctaactcccctatttcctctttacaataagacctcctctccaaaattaaagcacacgttttgccttactcctgcttctgctttccatcctattctaattccctcatgagaacatgaaaatttggtaaaagctttgctaactcttcatctccaacccaagtcctgttttctaggtttggttgaaatcattaaatgcttttactgttattacaatgacccctaagtatatccttttagtttcaaggctctgtatatttaacccttatatttatattctttttatatacttccacgttctcactatttcctcttcatcttttcttattttgagtttgtgttcttgcacattttgggtatagcataatcatttctcatgtgtttttctgacatgcgcaatggatgttatgcttcctcaatcttggcttatcctcacataccataccttaactcatgagttagctctgatggttaactattttgatggccattcaaatcttgattgtatccttttttctcagtactctttagaaataatttctattgtttttattgacatttaatgaagtaaatgtcagttctgttcactgagtcttttttttctttccctttttgatgttttttctttttatgcaagttactatttaatttcagagagtcattagatgttgtaattgagtaactatcccctttttattcatgttaatacccatcttctctaacaacttcattttttgtgtacattatttgtttatacagattgatctttctctctgatacaaggtcctctgagatagttaacttattttgttttatagtagcttatgtttttcaagcccctatgctatatttcatgcctaattgctggattgccttcaaaggtggcacagttaggtggtgactatggtttcttctacatgggctgtggtggacaggaaaccaaggaatttagctccttgaagaggaatgtataacaaggccctggtaccccacattcctagttcaagatcttcttctgcaggtagaacttggcctactcttcagcaacctcttccactgttatataatagaaatgatgcaacttggtgacatcattgtagacttccttacctccaaatctgaagtcaacacatctgttatgttcaaactctgctcgacatatgcatctctaggttttgccctggggtcctcattgccactatctaggtcttcatctggcccttagatactaaagtctcatatatttttccttcaaagggttcttagtagagtccaaagattccactgtagtcagatgactacatgtcccagcatctatatttagaagaaaaagataacttagagataggaaagaagagcaatagatttgaatttagctgtttctatgtccagatttctccttcttagaaagactgatgtgaacatctaaaataaaattacagtaatttaaatgttgataatactgctatttaagtgtgcccctagtcctttaagatattcaattccaacaaagtctgagatgcagaagtaataatacatataatgatcaatatctaatattatatgatggctaagattattgagcacttatataatgataattaatttacatttataatttatattaatatttacaaaacctctatgttgttggttctactactttcttcattttacagacaaaaaaagagaaacataactggtaaagaactaagtaagttacacaatgagtaagtggattagtagattagtagagacttcaactaatgcctgaagtttttctgcttggtggtcccccagcacagcacgacccaaactaattaatatactctaagtaacataattcaaagagaatgagcaagaaagcctcttccctaaaatatttcagcttttatacttattatttctactttctgttttttccttactttgaaatttccttaaaaatatttgagcaaattaatgatgaactacgtatcaaaggcaatattattctttaattaacaaaactccttagactttattaacatatgttactagttatgacaggttgcataaagaaaactttaattccaaaatgctgatctatctttcatgtcttcagaaattctgtttgcttacaattgcaatggatataacatgacctagtttttgaaaaaaattttttagtccttaataataaagggtgatataataaatctatgacaattaaagcaggtacaatgttatagtattttaccaaataattaaacaagagttttgctcctcttatgttctttgattgaacatcgtttgtattttataggaagactttcacatatttgatctagtctatgtgtagaagacacctgggagatagaaattttggctatgtgatagaaactatggtatttaaacttaatggtgcacttagaagcaacaaggaaaaacttcttagaaggttctgtttttctaggagaaatatgaaactaaatatgccacttatttttgggtattctaatgtgttctaataatatctccaaatgggaggtaatttctatattcctgtgagctctccattttatctatttcttttggaaaagagtaaatactccacacctataatgccaagtagttcttaatttacattttatttattatctttcttatggttagagtctatgtttataggaatattttattttcgtggctcatttctgtcattaaaacagataatgtaactacaaaaaggaatatgattgaaagagaattgtttctttaaggttatttcacaaagatattttgagacttttttattgtttttcttagatggaaggaagtagtgaagaagattctgtggggtttctgctaataaaatgatatagtagtcattagttgttttatggtcatttaattgaaatcaagtgtgctacagatttatactttgaagtatatgaaaataaaaatgtgaggttaaatattaatagtcactccaacatctgaaagacactgataatttgaattagtttgtgaatatataaaagacacttgtttttagaagtagtttaggtgcggaattacagaacttgttaaatagaatgacagatgagagagcagcagcgtcaactttaagctttttggtttagatatctgagtcactactacctccccttagaaagatagggagagtcaaatgataaatagactctggatgagagaaaataggcttagttgtggattttatcagtgagtgtgacttctgggtgttcatataggaatatcagataaaaacttataaaggaacgtggaactcaggaagaattatttttttcaaagagaccatgatcaacatccagaaatcagataagataaaaactagaaataagtaactggtttcaatgagtcacatgtggagttagagagaagagttcataatgctcttagctgaagttcggtagagaaggaaagaaaaaagcaaaacctaattttaaaggtacaagaaataaagataggaaagatgaaataatatctccttgaggggaagaaaagaaatatggtttaagatttcaacagaaaaactaagaagttacagcaaacaaacaaaacaaaaaccagataaatgagaaaaaggagatcttagtggtgaactttgatttaaaatgggaaggcgctgttaatttccaatttttagcctagtagtaattgtttatgagcaatgagaggcaagtcagtagtatacattaggaaggtggtaatagttttttgtttttttttgtttttttttttttttgagacggagtctcgctctgtcgcccaggctggagtgcagttaaaatttacattggaaaagaaaagaaaggatattagaaatgaatagtattcagagctcatctgaataagcaatcattaatttccaatagattcaatgctgtcctgtaggtttatccagtacgcttccaactaagaggagctgttttattgatccaaagccattatattgatccagagtcaacaaaagcaaaccggtggaacttgcataggcatgacaattaagcttgatgtcaagagaatgactgtcatgaaaactccagtaggtaacacattcttaaagaacagggaggatgttaaagtaaaggaggttacaacgagtttgagaaggttcctcttaggaataaacaaagtgtattccacacataaaggaggccagacagtatatatatgtctttctgggtctagtggttgccggggactggagtgaggtagtaatgaagaaatgttggtcaaacggaaaaaatttccagttacaatattaataaaatctgtggatataatatatagcatagtgactatagttaaaaataatactgtttacttgaaatttgccacaatagtaaatcttaagggtcctcaatacacagacatacataaaagagggtaactatgtgtggtgatggttgtgtttattaatttaattgtaatgttaaacaatgtatacatatatcaaatcatcatgtatgaatcatgtatgtataattttcatttaccaattacacctcaataatgctggaaacaaaaaataaaagaaagagaaaggcagaaataaaaaatgattaaattagaggaaaagatggaatatttggaacagttaaagttctggtaaagtatatgcagaaaattacctaaagatatgaatgataggaagttgaaactattaatggtcattgttatgttcagcactgtgttatgaaaaattccaaacgtacagcaaagttgaaagaatcttcccatgatatctataccagctatacaggaattttcagttaacattttattatagtgcttatcacatatgtctttatccatcttgctattcatttactaatttgtctcagtgtttcaagaatctcaaaggatatttcaggcagcatactccttttctgtaaaaacgttaggtacatatactgaatttctcataatattttgtaaacttattctagatttcttttatgtatcagtaactttgttttattactgacatttttaaaagatgcaaaaaaggcctttgataaaattcaactgccatccctgagtgaaaaaaatcttagaaaaataggattagaaacaatatttgtgtgtgtgtgataaaagataccaacaaaaatcatacagcaaatattatattacagtgaaatattggaggcatgcctcttgagattgataaaaagaaaagttcgcttgttaccatcacttcagttcaaggttgtactagatgtccttgccagtggaataagaacaaacaaagaaataaacatataaggattgaatggcaagaaataagacttactgctttgccggattgcaaaattgcatagaaattcctaaacaatcaatagataagcaattgaaattgataaaatgatttagcaaaatctttggcttcatggtcaatttgtaagtattaattttgtttctatattaccaacaacaaaaaatcagaaaataaaataaaattactatttgaataacatcaacaacttgtaaaagacagaaataattctaaatgataggcaaaaacttgccacagaacatatttaaaaattgaaagtaataaaaatctcaaataattatatgtattttaatggattgatatacttagtattttaagttattgtttctaccaaaatctatacatgaattcaacatcataatagataaaatcccaggagtgtctaagagtgtgtgtgtgtgtgtgtctgcgtgtgtatgtgtgtgtgtgtgtaaaattgattctaatattgatttttgtttttttttttttgagacagagtttccctctttgttgcccaggctggagtgcagtggtgcgatattggctcactgcaacctctgcctcccaggttcaagtgattctcctccagagtagctgggattacaggcacccgccaccacggctgactaatttttgtatttttagtagagatggggtttcaccatgttggccagcctggtctcgaactcctgacttcaggtgatccacccacctcggccttccaaagtgctgggattacaggcgtaagccactgtgcctggatggttctaacattgatttttaaacacaaagagcaaccaaagttgaatgacttgcactgtaagatgacataatttagtataaatttatactaattaaaatagcatggttaattaagacaatgtcatttctgaacaaagattaaaaataattgaatgagacagaattgtccaaaagcagatctacactcaaataagactctttaatgatgacaaaaaaggcactacagactaatagataattatgaattttagccctgtctcacatcagacattaaacctcattcaaggtggagggtggaggtagaaagtctcacacaagataaaatcataaagcttccagcagatagttcaggagaaaaatgtcctgaatttggaataaggtgacatttcttgaataggacagtaagttcaaaatatgaagaaattatacaacgtttaagttagaaaattttattcattaatagtgattattagcaggtgaaatgcaggatatagagagataggacacatttctcacctatttaacactcaaaaatctagttccagtttatatagagctattctctaagtaataaggaaaaaaatgataaatcaatcttaaaaggggataaaaagccttaaatagatattttaccaaagaggggatctacatatgccataaatatacaaacaagttcaaaatctaattagtatccagaggaaatcaaattcaaagttcaatgagatagcactatgcatctaccagaataactgaaaaggtggaaaaccccataatatggagtgtttgaggtagcacagcaactgaaatttacacctgcctttgggtacaacaacttgagtaacctcactggcattaattacaaacctgaatataggcacatcatatgatccagtaatttcattcctgcccagcagaaacgtgcacaaaatcatgaacttaaacactagcaacagcattactaatgatagtcaaattaattttcttaatagtaaaacagataagcaatggtattatatataatgtcatacaatggattactatataattaattttcttcaatagtaaaacatataagcaatgatattatatatagtatcatacagtggattactttactgcaataaaaatgaacaaactataggtacacgatgtcttgcttgaatctcataaacattgctatggtttgaatgcttttttccccactaaaatttatgttgaaacttaatccccaatgcaatggtattaagagaggtggccttcaggaggtaattgagtcataagaggtctgtcttcattaatgacattaggtgcattataaaagggcttgaaggaaggagtttacacctttttgttcctgttgtccctttcactatataaggcacaggattcctcccatccaggatagcaacaaagtgtcatcttgagtgcagagagactggaccatcatcaattggtgactggatcttggacttcccagtctccagacctctgagaaaacaaatttctgttctttataaattacccagtctcaggcactttgttaaagcagtatgaacaaaccaaaacgaatacaacgggtaaaaagagcaaaaaaaaaaaaaaaaaaagaaaagaaacttaatatacaatcccatttatatagaattcaaaagcttccaaattaatctatgatcataaactcaactaattgggttctggtgttttgggtctggatggtagtttaatggacatgtttatttttgatacaatttattaagctggccaattttcatgtatgcatttatttttatatgtatgtatgtgtatttgaaaagtcattttatcagttgatatagtttggatatttgtcccctgaaaatctcttgttgaaatgtgagcccccatggccgggcgcggtggttcacacctgtaatcccagcactttgagaggcccaggcgggcagatcacaaggtcaggagatggagacaaacctggctaacatggtgaaaccctgtctctactaaaaatacaagaaaattagccgggagtggtggcgggcacctgtagtcccagctactcaggaggctgaggcaggagaatggcgtgaacccaggaggcggagcttgcagtgggccaagatcgtgccactgcactccagcctgggcgacagagcaaaactccgtatcaaaaaataaaaaataaaaaaaaaagaaatgtgagcccccagtgttggagtgggtcctagtgggaggtgtttgcgtcacaggggccgatccttcgtgaatggctggacgtcctccctgtagttatgagtgacttctcacactactattagttccctgaacagtcagtttttcctctccacaatctccacactcttgctccctctgttgccatgtgacatgccagttccccttgacttctgccatgagtaaaatcttcttgagtgctccaccagaagccaagcaggtgccagcagcatgtttcttgtatagcctgcagaactgagagccagataaacctctttgcttcacagattactcagtcccagatattctttatagccatgcaaaacagacaaacacatcagtattcaaaacattcactagctaccttgcttataattctatcataattatgtattttatagtttcattttccttgatctttatactttcttttctcaccaaaagtggtattaaattttcattaaatttaaaaacagtttaaaattataatattaaaaacttatatgttaagaaagacacatttttcaaattttcaatttttttttctccaatgcatgagtaaaacattcagcttacatatgggggcatctctccgagaacttagaatttcagagtatcaggtagtaaaatgttgaaaagttttgaacataatctgctaatttaactgataagggaacggtagccaaaatatcaaagtgagtgaaacacagttatataattaatacatggcaagactcaaatttgcttttctgaccataagttcaatattctgttctttggtattgtttaatgcttcctagaaactttcttcagatagaaggtatttctttgatctcccatttctaaacttgctgcttgttgtaccttaagatgtgatcttcactggttataaaatttcagaaagaaaagtgctttgtcactgagggtaagcttaaatgtaagacttgcatcttttctccatgttttccaacagggatataccaagtccagaggagaataatcagtaaaaatgattttctgtacaaatacaaaatgtaagattatatcagaatatcaaataacaaaaataaaattactaaccatgttttccgtggagactgtagaaggaaataatgcattttctgatcattgtatctaaatttataatacggtgatattgttttttgtgctactgatatatgttttaaacatataaatcagacaatattaagaacattctaaaactatttactaaggcatcactatggtgaatatttttgtaaagtaaaaactcttgtaacaggaataatctttccttagttcatctgctcgcatgtctagttttctgaaatttaattttacaaaactgaagaacagtggaaaaaagatctgaacagatatctcaccaaataagaaatccagatggcaaataagcatatgaaaacatgatgaacatcatatgtcactggaatttgcaaagtaaaacaaccatgagataaaatgacacatccattagaatggttgaaattcaaaacactgacaacacaaactattgccaaggagaggatgtaactgaactcccattcatttatggtcagaatgaaaaagtgtacaaccacattgaaagacagttgggcagtttcttagaaagctaagcaccatcttcttggtaaatatccagcaataaaactcctaagaatttatccaaatgtgttaaacacttatgtccactcaaaaatctacacatggatgatcatagcagctttattcttaattgcaaaaaagtgaaagcaacaaagatgttcttaaatagctgaatggataaacaaactgtggtacatctatacaatagaatattattcagtgataaaaaaagaagtgagctggccaggtgcagtggtttatgtctgtaaccccagcactttgggaggccaagggggatggatcatcagaggtcaggagttcaagaccagcctggccaacatagtgaaaccctgtctctactaaaaatacaaaaatattagccaggtgtgatagcaggcacctgtaatcccaactacttgggaggccgaggccggagaattgcttgaacccaggaggtggtggttgcagtgaaccaagactgtgctactgcactctagcctgggtgacagagtgaggctccatctcaaaaaagataaaataaaataaaaaagagctctcaagccagaaaaagagctggaaaaaaatgagtattgttaagtgaaagaagccagtttgaaaagtctacataatgtatgattccaagtatatgacattctggaaaaggcaaaactgcatagacagtaaagaaatcagtagattttttgcacagtgacacttttctatatgaaatatatatatatatatatatatatatatatatatatatatatatatatatatgacattatgcacttggcaaaacccatagaatggtatagcacaaagagtaaaccctaatgtaaactatgggtgttagttaacactaatgtaatgctatgtattaaactgtatcttctgtcattcatatgttaaggccctaacaccaaatgtgatgttatttgaagatagggtttttaggtaggcttttaggaggttattaaggttaaatgaggccagaagggtagggtcctaagcctgttggattggtgaccttataagaagaagttctctttctgttcctctctctcattctctctacacacacacacacacacacacacacacacacacacacacagaggcatacaccttatgataactctccccctccccacagacacacacacacacacacacacacacacacacaggcatatgccttagaataagattctctgtctctctgtctctgtctctgtctctctctctctctctctttctttctttccatgagcatacctcaagacatgagaacacacagtgaaaagaccaccatcttcaagccaggaagacacccactaccaaaatcaagtcatattggcaccctgatttttgaaacttccagtcttcaaaactgagagaagataaatttctgtttaagccacccagtttatggcagtctgagctaagacaggcatccatattggttcatcaatcgtaataagtgtagatcaatgacagctattaataacagatgaaactacagacctggggagagagagcatatggcagtcttctgtactctcttcaatttttctggaaacctaaaatgtctaagaaatgcagtccattaacttcaaaaataaaataaacaaagaaaccccccacaaacacaaacatttttccatgcctccatcaatcagtcctttagctgccaagttacttgacagaggcagaaaattctttcaaagcaaatgttgaactagttaagaagccacagatttaagccttttttccaccaattagattagtatgactttgggatattcatcaaatctcttcagccttcaatttcttaaactataagttatgatgtaatgaatttatttaaaaaaatacttatctttttgatctcactgtatttttactttttgcatttttatatgattaaaggaatatttttagcttgggagctacaagattagtttaccaaaacataaatagtaaattcatcttttcaaagtgatgcaaaatcagtgcccttgttattagggctaattgttttggaatttgtgattgtgcgtgtgtgtgtgtgtctgtgtgtgagagagagagagaggagagagagacggagaattttcaaatttgagttgtgactaaaaagttcatagttttaataatatggggttttgacaaattttaaaatgtgatgaaatgtgagttatcaaaactgtaattactgaaatgaaataaaggcatattatctgttactagaaaactatttggtggtatgaacagttatgcttcttctcacttcttactatgaattcaatgaaattatttgcttttaaatcattttttataaaaataacggttgagatttaagatgaaaagatataataactatgggagagacttaaacatttgtagtttgcatcaacatagacagatattatgcatactacaagcgaagtatttctcctcttttcatccattttagtggttgtttagcattacatttattaacttctgacttgatcaacctaaaataatctgaaaagacacaaagtagtcgtaaaaatattttgagacccaaattatatgtgatttccactaggaatagcctattccagccttcgagaatcactatagatcattgtgttcagacttcctcttgagtaaatttgaggctactacctctgtaattgaaaaattttaagcacgtattttaattaccattctgtcattaggtacatgtggtactattccagattcaatcattacatgacttgctactcatgctgttgttgagcttatgaagagattaatgtaataacttgtctgtgctttctctgaattaatttagaatgtgcctcattctcttccttctgtttgattgaaaattagcaagaaacagtctaatgcagtgtttataaaagagtagatttgggactgcttgctctagattattaaaatgcttcaggttcagctggtttcagatggaggagctgggagtcttcaaaaacccctcagtgtttgttatgcatagtaaaatttggaaattctaatttatagaaagaaaaaatttatgtcgatttttctctttccagattaccctttgaaaaaagtagcatattcaataatctggcatctgtttattcaagacatatttaatgaatattttccatatttcagaaatcgctgcataaacgtaaagaaaaattgccaggcacagtggctcacacctgtaatcccaacactttgagaggttgagagaggaggataacttgagtccaggtgtttaagacaagcctgggcaacatggtaagatcccatctccacaaaaaaaacttaaaattagctgggcatggtggcaccgacctgttgtcccagctacttgggaggctgaggcagaaggatcactggagcccagaaggttgaggctgtggtaagctaaaattgtgccactgtactccaaactgggcgacagataagaacctgtaacctagtaaataaataagtaaatgaaaagaataattgaatcagaacactacctatggaaaattcacagaccaatacattctataagtaaacaccaacagaatggctaactttcttcggcaaacaacaaaaaagacatttttctaatgcaagattagaatgtaatccttggaaaggatttttattcaaatattacccttcttagaattttgtcatatttgaatcaaaatcctctccaaggattacaacatcagaaattattttagaatgtttcagatactgtgtatagcatacgttatctgtcattcaatccataagatatcaaaatgaagtaaataacattagttttgctttcattttataggtgagagtgtggagaggttaaatgctccattcaatgctgtacagcttgtaagtttactgccataatttgaaccaagaccggttgctgctgtctttgagctattctgtctcccctctaaaaaggcagaaaacctcctgtaaaaaaagggaagactgttctaaaatttctaaattgcatttaactacacagaatctttaggctcttctaggaattacgacaaaatgccaaagaaaagctggaaattgtaaataaaccatgctgagcttagggacaggtcgtgagataagtaataaattcttatttaaagtctaattttgacacacacttaccttatactcttcgtatcatcccctgcaatccacctcaccattacaagagaatggactgtctcttgcggagtcataatatgaaacttccctatgctatggagcctcccaaaggtctattcaggaaaggttgttatgcttttgaaagcaagcaaacacatcttaagggagtatagaaagtttggtgttaatgaatttagtcactatttaaaaatatacatttttttcttaatcaattattttggccaggcatggtaagaagcatagctaaacagcattttgagcaaagcaaacaggggacctaccctgaaggagcttaaatatagttaaaggagaaagataataaacaaaatagagaaaaataattgtatttagtctgttcttgcactgcaaataaaggcatgccccagactaggtaattcataaaggaaagaggtttaattgactcacagttccacgcagctggagaggcctcacaatcatggcagaagagcaagggacatcttacattgtgggagaagggagaaggatgagggcccagtgaagggtgaagccctttataaaaccatcagatttcgtgagaactaactcactatcacaagaacaagatgagggaaaccgcctccatgattcaattatgtctacttggtccttcccaccacactgggaattatgggaactacaattcaaggcgagatttggttgggaacacagagccaaactgtatcaataatacaaataaaaactgaaataacaaaccagatgatccaatagaggaacgtggtcaggaaaaacaagcctggcagacagatataagctgaagcctgaaggtaagaagaaaccacacaggcaggaaggaaaacaaataacagaccatgtcaggaagaaaacaaactaaacaaagttgatgagggttggaaagatcttgggctttctaacaattggtaggtggcagatttgctgtcttgtagcatgatcaggaaataatgatgtagaatgtagttgacatgaatgaatggaaaacattcttcattggaacctatgatggttaattttatgagttaacgtgacaagtacatagtacccagatatttggttaagcattattctcaatatttctgtgaaggtatttttgaaataaaattaatatttaaagcagtagactttttaagtaaagtacattctccttcataatgtaggtcggccatattcaattagttgaaagccttaacagaaaaagactgaactctgcagaataacagggaattctgtcagcaaattgccttcagacttaaactgcaactctctcttgggtctgtagcctgcaggcctaatttgcaaattttgaacttgccagcctccacaatcatgtgagctaaattcctaaaataaatttctctatctatttatctatctacatcctgatgtttccgtgtctctgaagaaccctgacaaatacaaaatctctaaagataacctgaaatttgaataatagcaaagtgcacgtagatccttccactggaaagaggtgagatggctctgggacatagtacaggatctgggaggcatgttgaccaagactcacagaagatgggactgatttttttggactttgagttatgaaaatggctacattttttgaaacttactatttatttacaattctatgattcatttcttttatgcctcaatgatatggtttagctttttgtccccatccaaatctcatccccaaatttaatccccacctgtcgagggagagacctggtgggaggggattggataatagaatcaggcttcccccttgctgttctcatgacagtgagggaattctcacaagatttgatggtttagaagtgtggcactttcgcccgcactcctgttgctgccatgtaagacatgccttgcttccccttcaccttctgccgtgattgtaagttttctgaggcttcctcagccatgtggaactgtaagtcaattttattaaacctcttttttaaataaattacctagtcttggacagtacttcatagcagtgtgagaactgactaatacactaaattttaatacattattatttaaagtctaattttgacacatacatccacataaaacagaaaaaaaagtctaatttcttttatcacttaagacattaagaaaaatttatgtgctatgtttacaaagatagtacttggaaggagaagagcagcccaaagagtgttgattgtagcaccgtccaatagatagagctgaaaacagctgtctggatcataaagcaagagaataaaaagtaggactgagatagcagatttttttatatatgtgaacattacctgaggattccagaagtacctggaggtgaaggaatttcacaaatactaagctaccagtagaaaaactgaatggtctctcaagccatcgtactttgtcattagaaagaaataagagttctggtatctgatctagcaaaggagactagaagctttcatttagtcctaacaatgagggaaaagctgtacaaactagatcacactcacaatttttaaatacatcacagaagtgaggtcacaggaaatgacaattttcctgaacagaaatccaaaatcagaaacctccacgagaaccagtgctgaaaccagaactgtaattaaggaattgctggaagctccatttggacaaataaaaactccatagggatgcagtcgtaggaggaccccatgcttctgtgagtttacctctaggagctccaccacagtctcagagacagtgctggagagaaattcccttgtgcttccaggaagaagaggagaaaagtaaccattttgaaatacactagagcattctattcttcttaccaaatcctgccctcgagagaatccgttttaccagagcctgtgggggacctttgacacaaaagaaacacactgttactatcagactcatctgcatgaacttccagcaatgattataagcaagcttgggggcaatatgagacgagaaaattatcccccagctgtgagaatggcacaaatcttcacccgctgttcagacatatttttatgcagagcaagagacttaatccactagaagaggtgcaccaaatccccttgtcctccaggcatagttaaagagtaaaaaggtagagaaaaaacggcctatcactgggagagagaaaagaaaaactgttgaagtcaagattctaaactgttgctaatagaaatgactaaccactggaggaagggaagagaattctgtgccatgtaagctctaacatagacacaaggcaacatctggatgacctgggtagaaaaagagatgaatgctgagaaaatttaaccccaggtgcacaggacttacctaagactgcggtcaaagacaattgagatatctctatattccccactatcagcctagcaagcactgagtaataataagcaaaaaataaagtattactatgtgacagggcaagacaatggatataaacttcctctgaggagaaaacttacaaggacaccttaaaccagagggatgggaggggggaagtatgaataatttaaaattatatgctctgaagacatcatcttaatcacagagcatcactggagaactttgaagccagtagaatgttaaagataaccatgttaaaatcaaagcaaaaaaaaaaaacaataatttttaaaaactcaacttgagataaaattgtttccaatctcttctaccatgtgtgcaagtacatgtgtgtgcatatgcacacatacccttccccccacacacatatatacacacacacacaaatggcctgacagaagagttatttccatattcgttcaaataaatactatttacttcagtctctacctcatatatccaaaatgtccaatatttcattaaaaattttgagatgcagaaaaaaagaataaaaaatgctacatatttggaaaaattagagcaatcaacagaatggattctgaatgtaccaagatgttggaacctttagagaggcatttaaaataactatgattaatatataaaagacttagtgtaaaaggttgacaacatgtaggaaggcacagctattttggcagagagggaagctataagaaagaattgaatggaaatagtataattaacattcataatatcaacagtaaataatttccttgaccatctcaaaagtagacttgataggccaggcacagtggcccacgcctgtaatcccagcactttgggaggccgaggcgggcagatcacaaggtcaggagattgagaccatcctggctaacacagtgaaactccgtctctactaaaaatacaaaaaattagccaggcgtggtggcgggcgcctgtagtcccagctactggggaggctgaggccggagaatggcgtgaacccgggaggtggagcttgcagtgagccgagattgtgccactgcactccagcctgggcaacaaagcgagactctgtctcaaaaaaaaaaaaaaaaaaaagaaagaaagaaaagaaaaaaaagtagacttgatatatatatgtgtgtgtgtgtgtgtgtgtgtgtgtgtatatatatataggctgaaattatgcaaactaaaacacacgagaaaaatattggggaaaaaaatttttaaactgtgggacagtagtaaacagtctaacaccatgtaatttggagccaaaagcagaaaagagtaattaataagacacttggacagaaactcagtaaggatacaaagatctgacaacagtaaaaaaaagaagaaaatagaattaagaacagataggactcatagaaacaaaccgcaacaaagagacttaaatactgtaacatcaataataacattaaatatagggcctggtgcagtggctcactcatgcctgtaaacccagaaatttgggaggctgaggcaggtagatcacttgtggccagaagtttgagaccagcttgggcaacatagtaagcccctgaccctaaaagaaaaatttaaaaagtagctgggcattgtaacatggacctgttgtcttagcttcttgggaggctgaggtgagaggattgtttgagaagtttgaggctgtggtgagttatgattgtgccaccgtactctggcttgggcaacagagtgagaccctgtctcaaaaaaataataaataaataaaaatgttttaccatcccaattaaaatcagagtttgccagattgaataaaatagtatatcccaaataattaattaattaattaaaatggtttaccatcccaactaaaatcagagtttgctgcatataaaagaattcactttggagtagaatggttgacatcagataaaatggaggaataagaaatttacaactttactcctttatataagtaacggaaacactggccaaatgattggaatcatctttttttctttttttgaaatctggatactaaccaaaggcttgccgtaagctagggagtgcttattcaaggaaaacagctgaatgtcagtaaacacggtgagctgtgcagtgttttaacttaacctacttttgtcctctgttccctagttcggcagtagctgtgaaaataagagctcacatttccaatactagagggagcagacagatctcatttgcaaatgtttgtaaacatttttttgaccagtttagtcaccccttggaaggccaactcaaattcttaacaatatttcgccttgcttagaaccaggtcagtgctaaagctgcttccaagggtatttgtcaaacacatttacagagtaatgttttagtcactgcttccagaaataacggataacaattgagacaactaaaggactaacgagatattcccaacacacagagagaactcctcagcaaagactagaagagtttttgattccaagtgtttaaggaaatcctgtccaaacattagctgatcactaagctaatggaacagagacttcagtgaccagaacaacaaagaatacagactttacagaattagttcagaagagtcaataaacaaataagcaaaaacagctatatggaccaacaacaatagtgaagcaacaagcatgtgtctcattcccagagcggccacaatataatattttaaattttcagttttcaagagaaaagaagtgtgcaaaataacaagaaaatatgtcccatatacagatgagtaaaagccatcaataaaaactatatttgaggaagcccagatataggaatttccagaaaaatactttaaaacagctattttaaatatgtccaaaaagctaaagaaagtcatctctaaaggaataaatgtatgtgaatcatatctcaccaaatagggaataacaataaagatatagaaatagtttaagtgaactaaatataaaggttaaacctttgaagtacaataactgaaattaaaaattcaataaggggttcaatggtagatttgagcaggcggaagaaagaatcagcaaactgaagataggacaaacaagattattcagtctgagagagaaaatgtaatgaagaaaatgaacagagcctcagagagtttgatgggataccattaagcatatcaacatgcacataaagagaatcccagaaggaaaggagagagaaagaagaaaaaactatttacagaaattacccaaactttccatatttgatggaaaatattaacattgcctgcacatctggcaaacctaaaccagcagtacacagaaagaattttacactattaccaaatgggacttatcacagaaatgcatacttgtttcaccatagaaaattcatcaattttaaatacatgttaatagaataaaggaaaaatatttcaatagatgcaaaaaaatttgacaagattcaatatgtattcatatcaaatacactcaacaaactaagattagaaggtaacttcctcaatctgatacagggcatctgcaaaaaaacctcacagataacattataggtaatggtgaaatatggaaagcttttcagctaagatcaagaacaagacagatgtctgctgttgccccttctattcagtattgtactacctgttctagccaagtccagattagaaaggaagaagcaaaagtatttgtagatgacatgaccataaggaatacacacacacacacacacacgcacacacatacacacccctcacataaaactattaatattaaagctaataaatgatttcagcaaatttgcaagattcaagatcaacatccagaattagttgcattcccctatgatgagcactgaacaatgtgaaaataaaattaagaaaagaagtccatttataatagcatcaaagggaataaaatccttaagaataaattaaccaaaaaaataagacttatataccgagagctatgaaacattatttaaataaattaaagatctaaataaatgaaaagatgttccagatttatggtttggaaaatgatattgttaaaggcactgtatttcccaagttgatctagagatttaatacaatccctaacaaagttctaacttctttttcttttgcagatatgatatggatgagctaattctaaaattaatttgaaaatccagcaaaccctgaatagccaaaataatattgggaaaaaagagcaaatttggaagagtcctacatttcaattttaaaacttactataaagctacagcagttaaggcagtatgatactgacataaggaatagaatagagaacctagaaataaattctcccatctgtggtcaattgattttcaataaagtttccaagaccattcaatgtggaaggaatagtcttatgactggatcaattacacacatatatgcaaattaaacccattttttaaaagatacctgatacgctttggctatttcccgacccaaatctcttcttgaattgttgctcccacaattcccacaagttatgggagaaaccctgtgagagataattgaatcatggaggtggttttcctcatactgttctcatggtagtgaataagtctcatgagatctgatggttttataagaagtttccccttttgcttggccctcagtcttactgccaccaagtaagacatggcttttgccttccaccatgatcatgagaactccccagccacatggaactgtgagttcattaaacctcttttactttatgaagatcccagtgtcagatatgtctttctcagcagcatgaaaacaaactaatacaataaattggtaccagataatggggtgctgcttgtaaagatacctgaaaatgtggaagtgactttggaactgggtaacaggaagaggctggaacagttttaagggctcagaagaagactggaaaatgtgggaaactttggaacttcctagagacttggagggctcagaagacaaaaagatctggaaaagttaggaacttcccagagacttgttgaatggcttttaccaaaatgctgattgtgatatggacaataaggtccaggctgaggtggtctcagatggagatgagaaacttattgggaactagagtaaaggtcactcttgctatgcaaagagactggcagcattttgcccctgccctagagatctgtggaactttgaaactgagcgtgatgatttagtgtatctggtggaagaaatttctaagtgtcaaagcatttgagaggaagcagagcataaaagtttggaaaacttgcagcctaaaaatgtgataaaaaagaaaaccccattttctggggggaaattcaagccagctacagaaatttgcatgagcaacaaggagccaaatgttaatcaccaagacaatggggaaaatgtctccagggcatggcagagacctttacagcagcccctcccatcacaggccagaggcctagtagaaaatatggttgtgtgggctgggccccgggccctcctgctatatgcagcctaggcatttttgccctgcatcccacctgctgcaaccttggctaacaggggtaaaggtacagctcaggctgtggctgcagagggtgcaagccttaagccttgacagcttccatgtggtgttgagcctctgaatgagtagaagtcaagaattgaggtttgggaaactctgcctagatttcagaggatgaaatctctgaatggaaatggctggatatccagggtgaagtttgctgcagggtcaaggccctcatggagtacctctgctagggcaatgcagaagggaaatgcgggattggagcccccacacagagtccctactggggcacgacccagtggagctgtgagaagagagccacttttctccagacaccagaatggcagatccactgacagcttgcaccatgcacctggaaaagccgcagacacccaatgccagcctgtgaaagcatccaggagggggctgtcgcctgcatagccacaggggcggagctacccaaggccacgggaccccagttcttgcatcagtgtgacctggatatgaggcatggaatcaaaggtgatcattttggagctttaagatttgactgctctgctggatttctgacttgcatggggcctgtagccccttcattttggtcagtttctcacatttgaaacaaccgtatttactcaatgcctgtacccccattgtatctaggaagtaacaaacttgcttttgattttacaggctcataggcagaagggacttgcctggtctcagatgagactttgcactgcggacttttgagttaatgctgaaatgcgttaaaactttgggggattgttgagaaggcatgattggttttgaaatgtgaggatgtgagatttgggagagagggaccagcaatggaatgatatggtttggctgtgtccccacctaaatctcatcttgaattatagttttcataatccccacatgttgtgggagggacctggtgagagatgattgaatcatggtggcagcttcccccttactgttctcctggtagtgactaagtctcatgagatctgatggtttgataagggatttctccttttgcttggctctcattcttcctgccaccatgtaaaacgtgcctttcaccttctgccattattgtgagacctctcctgccaagtgaaactgtgagtccattaaacctttttttctctataaattacccagttttgagtatgtctttatcagcagtgtgaaaatgaactaatacaatacccaaaacggaaaacatctcaacccatagcttgcaccatataaaaacttaactcaaaatgaatgacctaaatatacaagctaaaactataaactcttagaataaaacataggatataataaaaatacaaaaatagcaataatgaaacctttgtgacttagtttagaccatgatttcttagaattaatacaaattcatgaatcagagaaaaaaattgattaatttgagttcgtcaaaattaaaattttctgctcttcgaaaaatagttaaaaaatacaagttacacacttcgtatacagaatatgtaatgcatttttaaaattcaacaataacaatccaatgtttaaacatggagaaacattttgagcagatattccaataaagaaactatcctaatggcaataagtacacaataaaatgcacaatgcaattagtgatatgtaaattaaaatcactataggaaatcccttcacaactcttagaattaattggggaaaaaaacctggcaataccacatgatggcacggatgttgagggtaactggaatgctcatacattactggtaggaatgcaaaatggcacagccagcttgaaaaaacagtttggcagtttcttataatgtaaaaacatgtgtgtatatatatatatatatatattcactataaaacccagtaatcacattcctaagcacttacccaaaagaaagaaccaaaaacatatatccacacaataacctgtatttgaatattcatagcagtaatatttatgatcacccaacactggaaacagcttcctaggttcatcaaatttttaatgagtaagcaaaatgttatacaggaatatacaatggaagcctactcaccaataaaaaggaacaaatcattgataaacacaagatgaatgaatctgtgatattatactgtgtgaataaaaatctctcaaaatgttacctgatgtatgattcgcattaatgtatgaaacattgtgtgaaatataaaattctaggaaaaggtgaaagtttggatgtgatccaggggctagggttggggaaaatgattcattacacagagacacatataaactttttgaagtgatggaaatcccctatatattgtctgcattggtgatgacacaactatatgcatgtttttttcaaattgaatagaacagtatgcctaaactaggtgactcatattgtatgtaaatcatgcttcagcaaacctgactaaaaataagtaccactaaataattattttcaccaccaccaccaccaccaccaccgaaaccacagtaggtcctgtgttacaggtagatagacatgagcgtggcacgggagggctctccccacccactggaaacgtcgggtgatggttcagcaattattgcattgcctctctaaaagtaatgcattggcagccagcaccaaggagaggccatttcctgatggtccatacttgttaacattaaagtgttaattaaaggtagacaccaccccccaccccccccaccccccccgaacacacacacacacacacgcctccctggagtaccaacttccctggcactcacattaagagacaaaaatggtgatgtatgatcttccgggtacactccaccagaaaaaggaagacagccttagaatggcactcgtgtaactccctaaacacactgtgggtgcttacttcccaagggtaaggagggctctgtgcatgcgggcagcccaccctaagctaagggaagaatcatggaaaagaggaaaacctctcctaagatcgtggttaaacagggcacttgaccttctctctcttcttttttaatctcttgctctttttttttttttttgagacggagtctcgctctttcgctcaggctggaatgcagtaaccaatcttgactcactgcaagctccgcctcccgggttcacgccattctcccgcctcagcctcccgagtacctgggactacaggtgcccgctaccacgcccagctaattttttgttgttgttgtatttttagtagagacggggtttcaaccgtgttagccaggatggtctcgatctcctgacctcgtgatctgcccgcctcggcctcccaaagtgctgggattacaggcatgagccacaccacgcccggctcccttttttatctcttggacgttggtgcccactcggatctcttccaagcaaactttcctttctttcctgttctaaagtctttttaataaacttccattcttgctctgaaacttgcctcagtctctttttctgctttatgcccctcaggggaattctttcttccgaggaagcaagggctaaagttgctgcagaccctcacggacacaccgcaggtcacttggggtaactcagattcctgccaacagtaacagttcttttgtattcacctgttgtcaaagtaagacgtgcttattcaaatcttcacgtttttgaggtttatgctcaggtcaaataattttttcgagcttctcacccatgtatccaactgcctacatgttattttactttatgtgtcctataagtaattcaaatttatgatattcaaaacagaaatcattctctctgccaccccttcctgaaatgtttcccaccctttctttctcatctcatatcacagaatcagttattcaaactgggattctggatactaggattgtttcctttttctccctttctctgtatttaatcagatccaatctgtacctaatacatagtagacactcaaaatatgtttctgaatgaataaataaagaattctgttcctgggaatagaacaaatgtttgaatggtactaaagacagcctgtgctttcagaaaagcatcatgaaacattagctctgcgtttaggagcaaaaccgtgcaattaagatcagagcgtgggggaagggagtcaaagttactctgctgctgagatgcacgagttaaatactattagagaaataagaataaattgattgaggcaaaagtgtcataaactcttccgtgtttatctccttaggttttatgctctgcatcctaggtctcatttataattcttatatctgtctctacttatgaattcataactgctttgttctctcaaaggcactccatttctctacattttatgcctggctttgctaaatcaattaagttcaattgaatttagctaaataagtcacaaaactaaacccacaagaccacattaacaaagacatactgctgcattcactctcaatgaatatttagtagtatccatatttcctcaatctgaaagctgacctgatttattatctaagtccgtaaatagaataaaattgattagtcttaaaataatagccactattatctaaagggaagaaaaatgtagtaaaccgaagagtggtattcatgagtctgtcccggtcacttgaaaataaaatttcaataggtgtccaagcaggatgtgacaagccttccctgccttccctcccctgtccctgtttcagcagagatcagtctgcactttgaagctgcaaatggcatgtgagttgttttcacaaacccatgatggataatggctaatgggtagtactgtggtaacaaagcactaagttttgaacaaaatagctgtgggacttgaggatattttagtgcttcttttgcttcacaaacgcaccaagtttcctagaagaactggccaataaaactgccagaacagggaaggtcaaagcacaaaagaactaataggatctcaagggaagagtggtacagctggtggttattaccactcatgcctagaccaggaggtctgttaaaaaaacagaactctttgcagcaggcagaataaataaacttactctactccatgttgatgcttctttcagatgatcaagatggcattttccattttttaaattaatgtatttttattgatacatattagatgtgtatattttcagggtacgtgtcataatttcataattcatataaccaaattggggtagtcgtgatgtccatcaccttaaacatttatctttcctttccactaggaacattcaaattattcttttctagctattttgaaatgcacaattggttaatgttcgctatagtcactactgatctatgggacaccaggtcttatttcttttaagtgtatatttgtactccttaaggctgcaccattttcttcctttagactgaattaaaatagccatcctttcaaacttttctaaacgttccctcaggggagggcatctgtaatttgggtcattaatggctaaaaaatccaaattaataaacattagacaatgcagcggacaatttaaactaatttaaattatcagattattattttattacaggctatggtctatattcatagatttccatggacagttaataataatatattttagggacctctttctataggttagattttgcatggattaattaatcttttcctttggctatgtattattactttttcttattaaaaaaaaataagatactactagctactgtgtctcacacctgtagtcccagtgctttaggaggccaagatgggagcatcacttgaggccaggtgttcaagaccagcctaggcaatatagcaagaaacctgtctctatagaaaacataagtaaataagatactaagaaagatctctaagagagaaagaataaaatctgccaattaaagtgatataatttcttattacttaaagctttttctaaaaaaactacaccgattttattaatcagccatcatcattgtacacatataaaatagaaatataattcaaattaattaaagtattactaaaatgcattactattcaaaatctaattgttaattacttttctgtccaggtctgtcacgtgagttgacactatcgtcttctctgccaataagagttttagatgtagcatttatgaaaatgcattatgatataaccaaaagccagtaatggtgagctcttaagataacttcatcaaaatcccactttgggattattgctcaactgcttgattcataaccgctccccccacccatgccttccactgtaaattctgaaaataaaaagaaaattccagtgtcgtcatttagattttctttaatgcctctgccatccacatcacaaactttgaaactggatatttattatttttaaaaaatttataggcagtgacaactatgccattattactctccagctgacatcaatttgaagacagtatcaattaaaacatgcatccaagctgggcgaggtggctcatgcctgtaatcccagcactttgggaggccaaggtgggtggatcacctggggttgggagtttgagaccaaccaaaccaacatggagaaaccccgtctctattaaaaatacaaagttagctgggcatggtggtgtgtgcctgtaatccatgctgcttgggaggctgaggcaggagaatcgcttgaacccaggaggaggaagttgcagtcagccgagattgtgccattacactccagcctgggtaacaagagcaaaactccaactcaaaaaaaaaaagttctatccttatatcagatgttatggttagtgtacacatactttaatgcctagagatatgtagttagtgaaatgctcaagtcagagttcaaaaagaggccatcaagcccaagcccaagattagagctatctttacacttgcatattcaatattctggatggggggaggggaatgggaattttaaatagaattggcctccaactcctttcccagaataatttcttctacacttcttaaatgctatcctacctgtcaggtacagagcaccagagtattccagccatgtgagatttcctgttttcaactcacaagttctttcttgcttcaggtacaattgccttagacagggtattgcttgctgtaataacaaatagatctttaaaataaaatagcttccaaaagagtttcatagaatgatcttgggtggaattctataaaagtcttcaggagtcacagatgatgaaacaaatctgcaaccgatggtttccaaggctgtttttatcttataaatcagaacaatgggtgattcctagtcacaacatttatggaattaattattaggctggtgcaaaagtaactgtgcttgttgtcattaaaagcaatggcaaaaactttgttcacttatcctgagtaaaatacaaaaatgttattcttggtgaatcaactctctatagaagtaaaaaatagcccctcatctccactataattagcatgttgaaagcgtttgcctttcaatgaataattcctgctgatccagttaaaccaaagtaaaattaggaatcaattgctactttcctttttattcaagaacatgtcctcttagaagacagaaagggttatttcatttttagtagatcggtgaagatgaaaatgatggcaatatatgaatgtgtacctaattgaaatgatttaatgaaaaaagaaagatttctaaagatgtgaaagacatcttcattctcatgtttattgcaacattattcacaatagcaaagacatgggagcaacctaaatgtccatcgacaaataaatgaataaaggaatgttatatatatgtgcaatggaatattattcagcctttaaaacgaaggaaagtttgggaggccaaggtgggcgaattgcctgaggtcaggagttagagaccagcctggccaacacggcgaaacctcatctctactaaaaatacaaaaaaaaattggctggacctggcggtgtgtgcctgtagtcccagctacttgggaggctgaggcaggagaattgcttgaacccaggaggcagaggttgcatggaactgagatcccaccattgcactccagcctgggcgacagagccagactccgtctcaaaaaagaaaaaaaaataaaggaaattccgtcagctgagacaacatggatgaacctaaaggacaggatgctaaattaaataagccttacacagaataacaaatactatatgataccaattataagaggaatgtaaaatagtagagtgtcagtttccagggacaggggaagggggaaatggggaagcatcaattaagcagcatactgtttcagttatacaagatgagtaagtcctaaatctactgtacattatagtgcccatagttaatagtactacactgtataactaaaaatttgctaaggtgataggctttttaaaagtgttcctatcacacatacacaaataataaagagtgtagtaggaaaaaaatgacatcaaagagtatgccattcaaggatatcatagatcatataaaagatatcatatatcatacaagatcatgtagatgacagatggaaagatggggattcctaatgtagtgatctcaccccaaatcaatgaacacttctaaagtttctacataaaaacaggttttcaggggatactcagggttgtatacaattatgttcttcagggtctgacaacagataaaaatgctatctaataataataaaaacaacagaaatctatgcattttagagtacatccacatataacatctcaccctggattcacaccacaattttttttttatgttaggacaagtgttatttttatgattttacaaataaggcagctctggctcaggtcaaaccatgactgacaagttcaagaattcaactccaaggttttccccgacatcatttctatcattacttcttagaggagtaagtcatgggtgaagtcattcatttgcttctgggagccagctgtgaaaaaactgcatgcatcacgaatcgtctaattcctgaagccaataatacctgaagtcattttatatagtttactcacccagatgttacctgcagtatatgcaccttgtttcatgatggtccctggtaaagtaatctgcagtatacagccatggtcccccaaaacttggaattaggccttgcttcttttcctggctttaatggccttttgactatttttctcctgcattgtttcacatttacttcagttctactctgtattccaaacaaaaaatgttctccctaatccctctgtttctttgttggaaatttaatgcttctatgttttcaagacacagaggtagcataaaagcttaaaacctcatattggtccatacctctttaggaaagtatcatgcctctataaaattgccctattctgatccttctgactattcttcaaatgaaagagtctgccatatcatgaactttttcattgaaaaacttggcttggtttaaatgccccctttcagtaattttgtggtaaaatgaattgaattgtccaaaaatgaccacaggagctcactctagatttcttggacaaacagccaattaagatagttgggaataacactccagtctcaccctattctctcatcagaaggaactacacccaaatctcagcttcccacgtaagaagtcgctgccttttcttaacaagggaaattataacatctcatgggccccaagccctcgaggagtgtgtggctggtattcccaaacaacgcctatcaatggctggcatcaaaattccagactgcctgagaccaggtcccctttgttttccccatgtacaagataactttctcacatttgcttcataaaatgaaaattaaagggaaggcgatgtctctcccctagaacataaaataccctgtgggcccatgagcatcccaggccctgacaagcctctctgtcgagggaccaggaaaatctggggtttctctttctttgctgacctggccttgcaaataggacttcacggaattcatccagaatcctacccacatgagaaagttgacagacccagaagaaacctattttgcacaacacaatggtttgcaagctcttacttctgatagctaaatgatcgtgcaacacagccaggcacagagtgagtgatgcagaagcagtacgcactaaatgttatggctttcaccttctaaccagtatatggttaccaaaataaaaataaaactagcaaatctcaccatttatccctaagctaccaattccttttatttgcctagcttccctagaatagtggcttaattagaaataattacctttacttaagcagatcatacagatgtttttgaatacttccttcttcaaatcctatagtactctgtactttttttttttttttttttttttggagatggaatctcgctctgttgcccaggctggagtgcagtggctctatctcgactcactgcaagctccgcctcccgggttcatgccattctcctgcctcagcctccccagtagctgggactacaggtgcccgccaccacacccggctaattttttttttttttttgcatttttagtagagacggggtttcactgtgttagccaggatggtctcgatctcctgacctcgtgatctgcccgcctcggcctcccaaagtgctgggattacaggcgtgagccacttattgggacatttaaaacactcattaggaaacatttcatgtaagtgctatttataaaaaatttatgccattatttctatccaaagtagatgcttcctatcactagagaatacatatttcaacctgtcataattattactattactataataacaatttaattttgtaaatttatacattttagtgcttagatgctttttgttatattttctatgttatatcctgatttctgaaaaagaatattacccaaaatactaaaaatagagagctagaactgaatttacacttttataacacattaatgatactggatttttgtactcttaaattcataataaatttttattactacttcatttttaatatgtaattgatttttatatgcattttgaaattgtctaactacaaaaacaggaaaatataacagtggttatctcttagtagtggaataataggtgactgttttattgatagcctgtagttttaaattattttaaataactatttatcatttaagaacattaaaaaatgatttaaaaatccaaagctggcatctggacagttttgaaaaagatgaaggctttttcaccagtcattatcaaacaatttatacgaaaataatgtcttgactcaggggctctgggaggaaagtaacacagaatatttaaaaagtaggacacaccagataacttaacttttttttcttttttccttaaatcttaaccgagaggagtcaatcactttaactcccagggttttaattttcttatttaggtactcaccaagtacattcactactttatcactttttaatatctgaataataaaattgcgatgttctttttacttgaaagacctactctcttattacccatgattgcatctaggtctttgcaaagtagcacgtatataactataactcattgtttcctatgtaccaggaaatagtgtttctacttgtcaaaagtaccaagaagttttgctttaattaacctaattttaaggctaattaagataggtgtcattacaagaatttgcccaaggtcacctacaagtaagcaaaagaattaaaattcagatctctcgttctttctccagggtcaccacctgccagctccagagagtatccttcacccagtagcctaaaggacagggcacccccattccatcaaacatgactgccctctgctctgactatagaattgctgtaaatcccctctcaatatgccaggttgcctcctaattgcagacaggcaaatgtggtaaatggtcttgccttagagcatactgctaagtgcccaagtgagcatagacttatctgctcctcctgtgaattcatcaataaacagacagcagcattattgttgctatgagagaggaagctactgatttaaggttgaatttgccattactctctttctgactgactcagaaaaataatataaaaataagaaagctgttttgtttgtgaattcatttttgcacaattttcttttaggaaagccacaatcaataaaagttctaacattcgtatttccagctactaacaggtagtaaggttgcttaatctctgctgactgtgctgtgtgagaggctacgttccctgagttcaaactatcctggcaatttagcataatgctgaggctacaggtctagaccccagggaaatttgcttttactttgataaactgagatttctcaatactcctgtaacagctgagttacttccctcgttctagagagaaagcgcccttctttaatttcttcaggggattttcccattgggttaaatgagagcctactatctccttcagataacaccatgtaactggcagtgggggaagtggggccagagaagaaaagtaaatggcatttttggcatcaaatagagcctccagtaaaaatactaaccactttttgctgaagtgtttacagaaaaagaccattgtttcaggaaattacttgtgttgaaaaatgaaaaaaatctgtatatagcagcttaatactgctcttactgtttactgaactaatgtatttttgtcccagaattttacttctaaagaatatactctaaatattgccatcttttctattctgactgcattgtacataatgaaatcacattggactaagaattagtaacattaacaaattctaagatgtttcagtacctcttattgatcctttttatattaaaagtgattttttttcattacaggggattgtagaaattatataaacagtcatatcagtaaaatgagtttaaaatattatttgaaaaaactacaactttcctcacaactggttacctccactgaagagaatttattcatattttctgtggcaatgtgttctctaggctcccaacaggataaagaatctagaacaaaaatattttttaaagtggcagaaagatatacccactttgagcattcatcacaatgttacattccatgggaaaaaaacaaaagggattatactaaattttaacgcacctgataccaagcaacttcaaccatgctaaacaaatgtaggtaggggatggggctgtctggtattggcaaagacaagtgagcaaagtatctcactttacagaaaccattattaaccggtattggtgtcttcctaacttagatgactctttctctaatgtgtgtttgtcacatgactttccttacccagtgggttatcctaaacttcagtacaatgcactgtccagctcatctcaatatttccaacaacaaaagttaaaaatgtaagaccgtgattttttctgttgttctctatttcacaagtagtctacttggaaagggtcaaaacatatctggatgagtttccttctaatccgtccacttagctcaataaagtgctctgcatttttgccagatcgaaccttggaaacaaaaatggctcttaccaaagtctaaaatggagattttaactaacatcaagggttgctccaagcagactctcatatttagatgtatccaggaggccgggtgtggtggctcacacctgtaatcccagcaattccagcactttgggaggccgaggcaggtgaatcatctgaggtcaggagttcaagaccaacctgatcaacatggtgaaaccccgtctctactaaaaacacaaaaattagctgggcttggtggtgggaggcctgtaatccaaactactcaggagactgaagcaggagatttgcttgaactctggaaacggaggttgtagtgagccaagatcacgccattgcaccccagcctgggcaacaagaacaagactctgtctcaataaaaaaaatgatgaaatagatgtatccaggaaaaattcaggccttttttgtgctccccaaatcccaatagtttaagttgacttctgaaatctcttacactgctctactcttgtcccatagccctattaaactattgctaaagaaaaaaaaatcaatgacatctaaagcatggttagactaacttttttcaagaccatcacaatagatacagggactatggcaatggggtcttgcagtggggagtgagattgggcttcactccaaatataggaagggaaaataaaaatttatggacaaggagaagggtggggtcagtggatggaaaattactaagaaatgtcagggttaaggggattctgtttcagctgacctaacaggattcttgctgaagacaggcccaacatgattagacatcacctcagggaaggtggaagatgaggagcccaactagatatcgagcgtgatttgatattaagtgtgcagggatcttgctaaactgacttagcaggattcttgctaaaagtgaattttagaagaaagcaaacttaggtgaatactcagagcttgactaaagtttggtaaaggaagaacttatgtcactgtacaagtcagtgagtatccagcttcttcctacctggtaggcacttctaaatttcactataaacatgtgcgacttgaagttacagaaaagatagaggtgcagcaatagctaccactgttttcaaagaaatagtaccctctgtcccaaacctcatttttggttgtatatactggctaaaagtggttggtggatgagagtcagagaacctgcttttagccactgttcagcaagtcctgctattgatgcttaaagaaactctcttgagaatgtcattgattgtccctagctttggaacttcagccaatattctgagttattatgaaaaatttgtcatttttttttacttgggagaaagactgaagctattcaaaaatgaactggttcttaaaaatatattaggaagtttgaaaacgcacctaagcagaaggctttacgcctcacatttcagagcgaaaaaaatcagagtgtttaggcacaatctcttccctcaaagacaagacagtttaaaactaacaggagtgctaatagcaggaatgaaggagacacagaaagtcaaaagaagcaaagcaatcttttcattgatctatgtataaaatcgtgattgaatccctaaagtaagaaacatgattgacatgggtatagagcttactggtaaaatgcaattcatacccttcatatatatatatatatatatatacacccttcatatatatatatataccttcatatatatatatatacccttcatatatatatatcatcatatatatataccttcatatatatatatcttcatatatacatatacattcatatatatatgtatgtacacacacacatatatatatgaagggtatgaatatatatatatatgaagggtatgaatgtgtgtgtgtgcatatatatatatatatatatatgcacacacacacaatatttttgcatcagattccacctcagagacaagagtctacaattgttcacatctgtaaaaaagctgcaaattcagtcataaggcaaaattgaaaaagtaaaacccgcttaatagtgaagtgaggttgggggtagagaagaaagagaagtcagttgaaactgagatataagaacatgtgtataaagtcagaactaagaacacagggagaaaaaaacaaaagttagaattttcttaactgatgagacagttatcatatctcgaagataatttaacacaacggttctttagatttggatttttcactttggtaacattaagcactattcactgcctgccaaagaaagaaaagcaagttgactattccttcagaaaaaaaagtgtctactaaaaagaatgaaaataatactaaaatgcatactgtgcccagataaataagaagacttatcaaaggagtattttgaagaaagttattttgggtcctgggatttattttaaaaatctaagcctttcaacaaactgctttcctaaaattcagatttttttttaatgtgatacaggttagaaattttagaaaatctttctctctctctctctccatccacatttgttccaaaatgttgtccatatttatctctacatctgggtctctggaaattctgaactctatgttaccggaatgaggtatttagaacagctgaaaagataaaaattaacacattttatataataacatgaaaggatagtcccttcattcatgaattcatgtattgagagtcgattgtaagctggatatatgtgagatactgagaattcagtggtaaataaaaccagacttttttccatccccatggaaaccaggatttagtaaataaaacaatattcagataatcacacagaaaaaaatacaaaattacaaactatagtatcactagaaaagagagatgaattatgccagtagagtcttaatagtaggatttgacttggtcataggcgtcatggaagacatcacagaagaagcaactgagctaagaaataaagaaagaataaatatgaactagagggaaagctgttctagtgtaagatgtgctggggtaaaggtcctgtctcagaagacacatagagtgtttgaggaactgaacgccaacaggaaggtgggaaatatttgactgaggttgatgacatcattagatgcttgtttcaaaatgaacaatctgttttgtgatgtgtggacaattgattttattgggataatactagatggaaagttattgtttaggaaggtattgcaatataccaggtgaagaagatgttaatagcagagaaagaaagataactggagatacaattctgatgtaaaattgacagaacttaataaagagtttactattgagaaatctgagaaaggaaaatgtcaaagaaatcatctagcattccagcttgtttttttaaaaaaattgacaatgttacattaaagtaagttcatattgtgaataaaagggacaatcataatttcaattgaaaacatgttgaatttgagctacttttgctcaaaccaagcaaggatttcatacataattgacctgcagattacaaaatgagagtagagatcaggtgcggtgattctttttaaaaaagggtctcatggatataggcaagagtttaatttctcagtattaatactataacttaatcaataaaaactatggaagatttagatttttgagaaggactacgaaaaacattttttgtttacgctctatttccctaaacagaaacagaatctactttctaccacaatccccccggttcaatggcaaaaaaatgtgatagagccaaatgaaatggaatggaatggactgagagaaataaagaaagaagcaattcctattgcaaaaactgagtagaaaggtttgagataatgaagaaaaaggaaagagatcatagataagggacttctttatatctatattgggttgcatgtagatatggatggataggattttaaaaatagaatgatttctgtactttaagtcagagcaagaaaggaggatagtttgatcatccaatgagatctatagactatactttgctttcttctaaactttaaggatcaatctttagggcaagaatctataggaaaattgatctgatatgtggtatgtaaatttaaacttgaactcaagcatactatagatctgagtttgattcaaagctcattatagaattaagtcagttagcaggccaggacatcaacaaaactgttacttatataatgtcaaagcagaaaaggccaaagtaatactggtccccggagtaactgtctttggagacagatatcaatggaggcagtgattgcaactatagagctttgttgattggtggccatattccgaagatatcattgaacaaaagtgaatcttttgctttggcatgtgattttatcaaataaagcccttggaggagacacccaggcaaggcagctaatagacaatggttcacatgcatgtatttgtccagaacataactattaaaaagaatacagttgcctctgcagaaggaaggaagattctgagcaatattgggaagttgggggaagggcctcagagcaacagatatggcacaggaagtgccaggtttctggactgatatcctggaacaaaagattgatcaagtgaagcagcttcacatgggtctccaatattgactcccagtttagttgtgattcactaggggaacccacagggctcagcatgtagtcacactcatggcaataatttattacagcaaaagaatgaagcaaaattagcaaagggaagatgtgcacagagcctattattggccaaatatttgtacttccccaaaatttgtgttttaaagttgtaaccctcaatgggatggtatttggaaatgggtcttctgagaggtaatcaggatttgatgaggttgtgaggatggggccctggtctgatgggattagtgcccttaaaataagaaataccaaagggtgctttcttgctctctctctctctttctctctctctctttctctctctcgctctcactctttctccttctatctctgccacatgaggatatatcgataaggtggccatcttcaagccagaaagagggccctcactagaacctgactatgctagcaccctaatctcagacttccaatctctaatactgtgagaaaataaatttctgttgtttaagtcacccattttatgatattctcttatggtagcccaagctgactaatacaaggattttccagagtaagccaggtgcaagcttccaagagtcctcccttaattgagtcacacagtatgtgcttaattcctccagcaataagctatgacaacacatgtaaaacattgtctaccagaaaaaactcattagagactcagtgcccagggttttaattgagggatgctcatggaagcaccctctacccagtatgttccaaaatttcagactcctagtaggaaagcaggtgttcagctgttgtttgtacaaacagattaggcagagtaagccattcttattagttctgcgaatggtggaaagcctccctaaatcccatatgccagctaagggcctctctttctagcaggcatttccaaagatagcagtttcaagcctgttatgttaactcttttctccatatagcccaatctagaccctgccaggtacagaaatccaaggaatttttaagggaagcaaagtgagtgttgaaagatgaagcatttgaatggtgcattgaagataaagaagaaaaaaaatgacagcataaaatctataaaagcttgagaaacacagctttttgtaagcttcagtggccttgctttgaggtggtacctggggtgaaagccaagactgcagtgttacctgtacttgactggttactggcattagatgaagagttcgacagcatagaaattgccaaggaaacatacgtgtattgtgaggccatctggcataagaagttgaaaagaatttcagctttgtaataatatgaaaatattgtttgcaaaaggcagtgaaaaggaagtctgggaaatatggctcagaaagtcaagcaatgatcacaaatatgtaggtggagcttacttcatttaaaacttgattgttttcgcctcatccccaggctttcaaggaacctgagagcttctctccaagatctcctttattgttacaattaattggggtgaaatattgcaggagaaagccataacacacaaacacatcccagtcttgggatgacagtattttcactaactaatagatactttaagaaagtacaggccgggcacagtggctcatgcctgtaatcccagcactttgggagaccgaggtgggtggatcatgaggtcaggagatcgagaccatcttggctaacatggtaaaaccccgtctccaaggaaaaaatacaaaaaaattagccaggcgtggtggcaggtgcctgtagtcccagctacttgggaggctgaggcaggagaatggcgtgaacccgggaggcagagcttgcagtgagccgagatagtgacactgcactccagcctgggcaagaaagcaagacttcgtcttaaaaaaaaaaaggacagtacttcagtactttatactggagacagggaaccacagcctcagggatactttatgatggagactgtggatggagactgaggacattggagaaattgtctagcatgggattctctgaattcaggcacattccaaacaaggaaaatgatgctgaatttgttatttttagaattattcaaattgatggaagacaaaaattcaaaggctatccccggtaatgttcaaggatatgcctaaacaagttatgtaacagaaatttaaaaagcagagaattttcaatacagaacagagcagtgaagttttcaagtgcattttcttctgtaatcattcaaaaccgtaaacaattggaagcatcagtttcatacttcatctcttccaattcaggagagagagtgccctaatacccacgcagaagtatataacaaatttaggaactatttttcaattggtttatgttaagtgtcagctttggcagcataacaatgacttatatctatgtgtaaattcatatgaatagagaaatcacgtatacatatttgtgtatacacatgcacacatatatatatatatatattttaaaaattattaatacattgggtcagagaatgaaaagttttgatacagaaactgatagtaataagtagatataaactaccaggctgctactgtgctgaaaggtcaatttttatgtcattatggactcattcatttatatattaaaaaaatgaagccaaaaagcataactagaaccagagtcacggttggagctttcaattgttttcaattgcttgttcaactgcatataatcagtcaactaggcagttggcttgtagggaatctcctaggctttaggacacttatgataacagctatggtctgattggcacttgccctaccctacaaagatgcacttgaaagtcaaactttgagataatggaggtggaagcaaccggcactactcagtataaatgtgtgtttcatacaaccactacttcaggaatggtgaatcccttctataacctgctattgaaggtataatgatcaagagtatgaggcacagtcaatgtgcctaagtcgaacaaaagaaagaacaattgaattatgtgaatggaggaagtagaatttcagagaagcacaggaacatcttctcacaaatacagacacaaatatatatatatatatatataaatacacacacacacacacacacacacccctacacatacatatagcccaaaacatcaacaaataaaaatacacaagtatttataccattagtcaaatttgcattggaactggtttacaaaactaaattgaagtagaaaaatatattacatgctcagagaaaaattgagaagtacctgggatttatctttggttctttgtggattttacatataatgcttgaataaaaactcttctttctttttctccctaacataatgtagaaaagggataaaaatgaaaatgatagttttctaaaaatacattctttagaatcataatgtctttgggctagttaataggcattatgcaagcatacaaaaattgctatgtttaaatatgtgaaaaacgttagatcaaacaattacacagattttcttggtgcagacatggaaagagctataatataacattgtatatacaatcagcaaagaataatgaagttttattttccaaaatgaaatctgatgtagggaacactaataagctacaaaagacatttggaaaaatgttaatctcagaaggttttctcaggtcttttcatacacagaatgttatttttagggcacgtggtataaaaatatgtgtttagtcattgtggtcaacttctgacacagagttccaaaagcccttggaattccgtgagtgataggaaggtcttttgttattcataaagaacccttttagacacacctgagtttctacttgagtttataccttgttgaggtccctagatagcttcaggatgaggactggtcaccagaaaagaccaatcacatgattagagaactggaaatttcagccctaccccctgacttctggagagaaggagggggctggagactgggttataaaaactcctgaacaacaagatgtggggagcctccaggctggtgaacacatttatgtgctgagaaggtagagagtacggaaagggtatggcaactgtgccaccgtctgcctcctatacattgttttatgtcttccatttgtctgtttctgaattaatcctttataaaaacctgataatttcaaggagagcactttcctgagttctgtgaatcattctagaaaattgtgggacctgtggagtaggtcctacggctgacttctcaatttttctctgagcacgtaggaagccctgaacttgtgattggctggactggacgaaaccatgaggaggctgagaagcccatttgcagctgccagctgaagtgggggtggcttcgagagactgagtccttgacctgtgagtctgcactaggtccaggacttagagtcaaactcgagttgctagacactcagttgatgttgaataattagagcattggttgttggtgtgggaaaatgccatacattttgtgtcatagaaaaaaagtaccgcccaggcggagggaagcaaaatagaagctgatgctgcccaaggtgatcactcccagccaccagttctcagccagtcctcactgcctttagaactgggaatggtgactcttaaccctggcagcacggaagcaccatttctccaggccccatttcagaaaatgttacttttaattctaaatgtgattgtcccatagtatatataaaggccacattttatagtgtacaacttgatcaattttcacaagctaactcatacaatctaggaaacagcttttccttgatttgtaagttttctttatttgttctggctatgagatttctactggatatatgaaatgtgaaaatcgttttgcactttgtagtttcaattttcactctcttcatgtttttgatgaatcaatgttcttaattttaatatagtttaatttgacactttacaagttttggaccctgcttcagaaattattgcctattcagaggtcaaggttatcccatatttccctctcaaaccatcatccctcaaaccatggtaattttattgttaaaagcatacatgctattttttcttttaaatattaagatctgcactccatttagattttatttttgtctatggtatggggttggtgtcaagatactattgcctgctccaagattaaaacaaatttttcttcttgaatctttattattattacatttagatctgcaattcatctaaatttttttgtgtgtacagtgtgaagtaggggtaaagatactaccttttcatatatcaatgtctaatttacatatattgacaacacaattattttctgacttcatcgaagtgccactattatcataaattagatgacattacatgtcttgaggtacctttagaatctatattctgttctatttttttctatcctttgtcggaatcataacgtcttagtacagctttataattttatagtagaatcacagttgttactacagtttccctgggtttgtacttctattggagattactttgtcttttcgtggcacgttgtataaatatatggattcataatgtgtcaatgtctgagaaaaaaagtctataagtatcttgatggttttgcaaatttatagataaatttgagcagaactgacatctttacaacattcagtctccagaatatacatggtatttgctttggtcatcattaacttatttcaattatattttatagattttaatgtgatcttacaaacctttgttttatttttagatatttaattattttattgctttgtaaatagtattacagaacttgtttaccctttattcttatcttaaatttccaactgtattgttttatttgtggtagaaatacaatcgctcttttttaatattgacttggaccctgtgatgattgtaaatttgctaatttagtgaaatcatttatagaataattttagagtttttttgttgccatgttatagtcaagaaattaacagttttatttatttctttccaatccttatgtccttatatatccccctcctttttttacttatttatttttgccttattgcaatggttagtttctccaccacaatatgacaatggaaatagtgaatatgctcattttcttccccctctacagggaaaatattttctatttttttcttttaaatcactgaatgtatactcactctaggttttctgtagctatctcttgccattttaaaaagtttactttttctcctaatttgctaaaagatttttcatgaaagcgtgttaaattttagtctaatgctttcttttggcttctatgatatattattttttctcgaatgttcttgacaggatttagaatcatggttttgttagccaccaaaaaatagttaggaaaggttaccttcattattctatgttttgtacaagattgcggttgtagctttcttaaatgtttggaaaaattcactagtcttcaccatctgcttctggagttttcctgtggaaacttatctaaaataacaaatttaatttctttgacatatgccttactactgagattgtatatgtcatctcttaactttggtaagttttacttatggagtaaggtgctcattttaaccatattatcaaatttctttgcttaaagttgtttgtagtgttcttttttatttatatgtatagagcttgtgtttatgtgcccgtttttatttttgtaattctgttctctttcatcctgatcaatattagatatttataaaattgattaatctttaaagtttcaatcattgctttggttacattctctattctgcattctttctttctttctctcttttatttttttgagatgaagtctcactcttgtcccccgggctggaatgcaatggcatgatctcagctcactgcaacctctgtctcctgggttcaagcgattctcctgcctcaggctcctgagtagctgggattacaggcacctgacaccacgcccagcttacttttgtattttttgtcgagatgggggcttcactgtgttgtccaggctggtctcgaactcctgacctcaggtgatctgcccgcctcagcctcccaaagtgctgggattacaggcatgagccaccatgcccggcctatttatttcattcattgctgttctttattatttatttttcctttacgtagttttgattctttagatgaaaaattaaattgttgatttttaccctttgttctttctcatatatgcaaactggctatcatttttttctttaaacaatgctctagctgcatctcacaattttttatcttaaaatttagtggaataattttataattttatactgatttattcttttatccttgaattgtttacaagtatattctttaatttccaggaagtagaactgtttttagttataattttgttgggattataattaatcccataattagaggacatattttaaattattttggtatcttaaattttggtgaggctttgttatagcttattgcatagttgattcttattaatctcataattaaataacatattttaaatcatttcagtattttaaatttttgtgaggcttttttatagcttattgcatggttgattctagttaagctcagatgtactcctaaaaaaaaagataaattctgtttttcttaggtgcagtgttctatgttctaaatctatcaattagttcaagtgtattaattgtgatgttcagatccatttttcttttgtcttatttttgtatgactttctatcaactatgtaaatactccaaagtcaaaaatccttccaggtgggcttcaagcaagtgaatgtttcaatattgcctcaggtgcttctaattttcagccagctttgagaagcttcagttgagagattaatgtcttggtcattgatgtaatccttaaatagatgacagtaatccatttaatgcacaagtttatactaaacacacatctcaggatgttctgcagaataatccattggcgtcttattttttcagtaagacagttttcctgtaaatttaataatgcaaaggcatacttccttcatagaaaaacattattttctctctaacattacaacatttcctaaatggttaaaatagtaagggagcctaattccataaaatttatcttgaaaatttcaactgttggaaaaaagattcaaatacagtattcttctgttgctaattattcaataaatcacaaaaggaattctttattgtgatttatttttctcactaaatattctcagcttatgtttagtagtagcaactcatcaaaaaaaatttttaaaagggagagtaaaagaagcaaaatgaaatccccaaatcaggcaggtgtaactggtagcctaacagcaaaatttggccctcagacattttttgtttggcctatagaattttttaaaactttgccaatatttttaaactgagagatgttatataaaaatgaagattcaaattttttaagatgttagaaacttgatgggaccactaccataattttatcagcaccccactgcctcccatgttggaggaagcatctgcatcctagtagttttatccacataaggatcttggttggcagtgtgggtagattatttgcaagcccagctataaataagttctataattttaagcatcctaattatcaccattcattccacactttgtcaagtggagtgtgtttggggtgctgattgggtggaagatattatagatcaatctatagtagagattgtcagagaaaactgcaaataatatatggagaaatatgcatcaaacttgtaaaatcatatgattggagatatttctaacaaagttgttagtggaattttaattagatagatgttaaatctgagggtttttaattaaaaaaacacagatattaacacaatcctggtaggcggagacatggtgttagaaataggagtaacaatgcaaaatagacctagaagaaaaaactgggacctagttgttgccctctaagaaatctccctcccttccccaagctccacgccattgaagcagagcagaaataaagaatttcccacaataaccaacatacgtacatattatatgggtttcttgaagtagccaggaagttcactatttaaaatccagggtcaatgtcatgtagcatttactgttaatagaacttaatgaacgtgtttggaatgatgactattgtaaaagcatgccatttcatggaatcagaaaattagttcagagagaacttgtagggaagctgacttgattataagcttctgagttatgtggaatctgtttataacatcattctggctaaaaatattgctagtcccaatatctaagatagaaatacatcttcagggaggaaggggttaaactgccccacagctgtggcaaaataaatagttattcgcattattttccaagatgagagaaagaatttattttggattctattacttctttagatccagagaaacacagaggacaacagaatttggatatactttagaactaaaagaaaatccataacctgattcctctgagtctgtgtagattctagaatgtatgttaactgaaaaaaaaaaaaaaaacagaaagcaatattgtgaataccaacaactctctctttcattaagaaaaatggatgagatcaagtcagggtttaagtgtaagacagagaaagaaacctaattaaaacgagtgtaaaagcattctagataattcgacaaaaatgttgaaacacggaagagggtttctctttatgaaccttacagataaagaataatttctttcctaactcattgcaattaactttagctgacaggaagggaaaaaataaaaaaaatatgtagtacaaaaacatttgaaaaaatactacagttaatctttggataacagcaccaatgtagctttaaaatttgttataatacagactttttccaccttcattttatataatttactaacatatatagataagaaaagtctttataatcctccagcactgtgtttactcacccagatagttccaggattaactattggaggcctccacagatgtctatatcttattctttaccttccttgaaactggaaaccattccctgtgaagaaatattacgaaaagttacacagatggccttgaaacttaaatatataattggaatttctcttttcctcaccaaggaaaagaaacagttctggttggaggtgggaatagctagttatccatgacccaatttatagctctatttctagcccattaaattctatataggcaaaagtttaaaactagtccaagaaggcaaatgacatacttttaagcacttaagagaaattaccaagttgtctactttctcagtgtaggactattattttttgggttgtctttttgtaaaaatttttagtgttgaacaaataataaaagcaattatacaatgagtgagcattcccttaatctattcctaagaaaaataatttcttgtggtacagcttcattttcatatgaaaaaattttactgatttttataggccttttataaatgaacattttggagagaaaatgtggagcccggggaagcatgtctccaataatgcaaacagtctttattataataacttcctggattttctcatagcttagacccctttttgtttttaattgacgttctatttatattatgctaacataattactctttgatatgatgaaaatttgatggctgttctctttatcaagatgtcaggattttttggtatataacactttgtcatacatactttaaaaaatggatacatgcccacagtcaacatgtaagtcattttattaggaatacatttgttcattaagccaatatttattgagatcttttaatgaatcataaacaactccaaagaattgcatgatctagaaaagtaaccagacaagaaatataaaatgaaatatacacatggtatagtacagaagagatattatttgttcaactgggcatgcctcccaaagggcatgtctatgctgaaattttagagttgagtggtaattaacacaggaaagatttggagaggctgtttgtggtgatgaaggcacagaggtgcaggaggatggaatagctgtatgaataacaagtagtctgctatgtttggctggcacaagggtctgagtggtggattggtaagatctgagttaactaggtcatccgagaccagctctctaaagaccaggtgaaaagtttacaaggaagctgttgaagaattttaaacagagagtaaccatgtaagattgtatttaaaaactaatccaacagctgtcttgagaattaagattggaggagtttgagacagtaggcagagaaaaataaggcagtgaaaaggagagaaagagggagtgaggtttattacagggatgacaagcacaatggaaaggatttgggtagggagaagagagaaaactatacaaaatatttattgggcaacagactgggcttagtggtgacttcctctgaggcagaatataaaagaggaagaatagggtctggagggaagacagagatgggttttggggatactaatggatgtttcagtatgacccctaagtggataattaatcagttgtgatattaaaaatatttaataactaatgcaacaaaggcaatgcttaataccgtggatgttggcaaattccctaccgtaaaatgctggaggcttcctgacttaccaagcagcagggagggagaaagaaacttaactgctgtaaggttggaaggtccatcacaccagagctggagaactgccagtccagacggaaggtacttaaagggtgtgacagcagctttaaatggcttgttagtgcagttgacaccttcgcagccataccagtacaccgggatgaataccagccttgtacatgtgcatctgcgtatcaggagagcaacctgtattagacattgagttttgggagccttttccctttgtgccagttcccagagttctttgtaagaagacacttcctactatttccattttattattcaataatggatgcttttactccatttcttacaggtttattcctaaagaacaggagtttcccctttctccatgttcatattaaattaattaagtggttcttttttatcatagtatcaaacacagattcaaaaataaaacaaagacagacattgatatggcattttaaagaggattcttttaattttctatttagaataatattaaataatgactaaatattatctgcattgtttcttactatgttcttgataatttcttttatttttttcattttctcttcttttttagaaaatcaaaacttgtataacctaacagcatgtttcagaagcaccaagcactgtaaagattctgagattgtattcttcttgcaagctaacaagttagactgccactgtttcatgaattctggcagaacatatgacactcttgagtgaggcacaaatacctttatgagtcacaacaattccagtagccagaatatcagcattttgttgagcaagtttctcaagctccaactcccagagggcaagccaaagacagtaggtgaagctcgcacacgaagtgagttgtgttaacagcagaaaagcacagagtttaggggagctaattcttctataaaagcagtaagcatgccttcaccttgctccagaggtagacattattttactttactggacagtaaacaaatctgccctttgtgcttgagggagatattattcctatcttccaaggctgtgcattgtacaaacatcattggaaggagtccagaccaacatgtacagaaataaaagagatcatagggggattgtcttcgtatgttatctgcacattcctttactatcctgacttctggacaatttctctgtaagtacacctcttcattgaccacttcagttaaactgtccattagtagctgggaccaaatctgttcaatttgtttcatttagcatttaacttaggccactatcaacaccacctcaagcagcaggatgaggccgttctgcatatttaaaccactccccagcatcctggtcttaaccagttgaacaaatcccataagccatcagggtctaccttggaaagccatgcgactttctccttaggtttctgaattgactattccatagggctggagaccttaatcctgaacaaaagaatatattaacaattacggtctccacctttgcatgcaagaaggaattttagggcatttttaaatctaaaataggtcactgaattgaggctgacctgaaaatcttctagggccaagtaatatttccttatacacttgaagttctcttatgaccacatctgacgagcaagacatcttgtttgcagaaagaaaaaagttaacaactggcttctactcaggaaatatagttgagtagttctcagcgttcccagtttagcttgaataactcggtttaatccctgtttgcggagagcctgctgggggcattcagttcaagctataccgtatactgtattctatgttatcagccggatggcatgcttctccccggggaatgactaaggagcagctgtaaaaataggcatgaagcagagacagtacacctgtgttgacaagttgcttagaagattcagaagaaggagccattctttgcagtttctatagatttctccataagattaaggcaaatagtgatctaattgtggacagagatgtctgctgggcatagctaacccagcaggtggttaaactgaaacttcttgcaacagttccagagagaagccccacagtgattccttcatgaggaaggctccaaaggcagatctgaaagatgaaggtcaccgatattcctccttcccctacacctctctcaggatctgatatacttgttatctggcacattaggtacctggttgttgctctccctctactaccacaaagcccatgtgccacattttagtagaaataattttacttattttcttgtcagaatttttctctggaagagtcaggtgtacgaagagcagggacagttttatagaatttacagagatttgttgtgttctctacattggctcacattgccaatagtagtgtattggaccagatgatcactatctttgtgatctaggattatgccagtattacaggagaatacaggaaactgagccagaattaagcctaatttccctaggcaggctcagtgtgcattccaatcaggctgaattggtgttacttttacaggaaaaaaatgaagcatcagatccagaaatggtaatggcagaaacctgaaatgcttatatataacttctgacttgttttgtcctgataattacccagaaagcacttgagagtggattatttctttctggtgatagctacattcattcacaaaactgccctgtatgtgaaccaaaaagaggtaaggatggtggcaaacttctaatgtcaacttttaaagaggcctttctaatgctcagaaaatactagatgactgtggatgagaacaatgggtgacccactgaataccttgacaatcacttatttttttagtaggttttgtgataaaaggcccaccactgccaaatttcaaatggtccagaaaattgaaaatgtgacccatattagtttcaggagctacagcgatttggcctgagccagcagttggactagagctgcaactctctaacctaaaaaagtgtcactgatgctgaagcatgactgatagttccatatggggttacatgcctgatatattcattccgccaagaatgggccagtgcaatactgcatgccatgcagcttcgttaccttgagataaaagaaaaaggtcaacatttctggggagtcacaaatgttgcatgtagtggtagcctctgcagtagaaacacagagtttttattttgtatctagtctaaaatggtggatgtgttgtcacgcacatgcatacaggaagcaatggtaacagtctaggcggttcttgattccaattgttcttataaaaactagacccttatcgggggtatctagacgacttacccagatcagcattcatgatttgtttttgtttgtggtttcaaagaggagtgactttaaaatgctagtctgcagctttccaaacagcagatccaacactaagctattggaatggacctaagagtcagtgctggagaaagacattatgtttaagataatggactataaataaccctgcactgtgctccagaaggagacactatctctgtcttccaagtctgttcacactacaaacttcatgagacaatagtccagaagaaaggcagtcagatgtgaagagatttcccaaggagaaatagtggacagaggcttaactattctgaggacataatctattaactgcttcatatggttgaagtgccctaattccttttttaaccaagataagtgacagtgacaaccaccaattacagccttttattctctaattagaccagtgacaagtgggcatcctctattttctaagagaatttattataagagctgagcatatactttaaaatatatataactaaaagaaataattttggccgggcgcagtggctcacgcctgtaatcccagcactttgggaagccgagatgggtggatcacgaggtcagatcgagaccatcctggctaacacggtgaaaccccatttccactaaatatacaaaaaattacccaggcatggtggcgggcgcctgtagtcccagctacttgggaggctgaggcaggagaatggtgtaaatccgggaggcagatcttgcagtgagccgagattgtgccactgcactccagcctgggcaacagggcgagactctgtctcaaataataataataataataataatttttttcagagcttaccatctattcatcctctctgtttgttattatttatataaattatcttttgcaaacttaatatttgagttcgtttagtaatatttgttcaagggtatagttgaacaagcacaacatatccagaggaagaaagaattgtcacatgaggatgaccaaaagactttctagagtgaaaataaaggattttccatggatatctaagacattcactcatgctaatagtaggtgttctatatttcaaagcaataaatattttacataattaatgctaaaatggttattgtgcaaccattcctagctcctgaggtctcctatattatttgagcatgggtcttctcatttcaaaggtaattggatgctgatagttattacagaaaggatgaataaattatctctttccaatgcagtcataatttcagcttccatcatgaacttccctatttagcatctacattagtttgctagggttgtcataacaaaatactacagaaatttattttctcgcagttctacggggttgaagttgagaacaagctgtcatcagatttaggtccttctgaggcctctctctcgggtttgcagatggctgccctcctgctatgtctttacgtggttgtctctgtgaacacgtgtacctttgatgtttccttgtgtgtccaaattcttattatgtggacactagtcaaattggagtagggctcacattaacagcctaattcaaccttgattacctttataaagatgctgactccaaatatagtgacagactgaggtactagagagttaggacttcaacatctgacttttaaagggacgcaattcagtccataaagcatgttttgtttttgtttttgtttttttttttttgagatggagtctcactctgtcacccaggctggagtgcagtggcccaatcttggctcactgcaagctccacctccccggttcacaccattctcctgcctcagcctcccgagtagctgggactgcaggcccccaccaccatgcccggctaatttttttgtatttttagtagagacaggttttcactgtgttagccaggatggtctcgatctcctgaccttgtgatccacccacctcggccttccacggtgctgggattacaggcatgagccaccgcgcccagcccataaagcatgtttctttaaatattagcatttgaggtattcatttcaccggtgttaccacctctcacacactaggtatcagggcaatttccgtaactgcaatgcacggtctcagagaaaggacaattagaagccaagagtcggcaaagaaagaaaaggtgtgttttgcccatcttcccatgatgcctcagagagacatggggagtggaggctgggtgagctcctgatcacacacatggctttctagtcgagtgaagggaccttcgataaggtaagcatgagaacaaactgattcaaagagggatacacacgagtttcggatttgagagccaggctgtctgcactggttgatagcttttctttacagttatctgaaaacaggggtatctgggaaatttaatccctctcagcatcacagcaaaatcaatgtcagtgtagttgcttccatgagaagaggagcggtggctgaggttctgggaagcacacttcagacaaggccaaggtcaaggcctgactgattcagccagtaaaaacacaatggcctttttagattcagacacttttatcacttacatagaccatgcaagtaagtatagccaaagatgcccgctccctagctccttatcccacacaccaaacagatgacactgacataaaagtcacagaatcatcacagtaccagttgtggaaaactctgctgagattcagttcttgaatgcaaaattccttttatgatctgcaactataccccgagatggagtggggacataaaccctcagaaccccagaaacaatgagaaactatttcaaaatagcctcccagggaaaaagaggatgatttggaaatggccctgagatagagcctcacaagccttctatctttgcctgttgagggaaaatcacaaactattcctccaagactcgaggaacagtgttttaagcctttgcctgtatggatatgtggataggtgtaaggtctccaggccaccatgctgatgctgttcccctacagatctccctggctgactgtccatgaagcacagagtgaagattcagggtcatttttagacaatcctacccttttatcccttttatcacagatatagtaaatcaatagtaaataagaaatcaacatccaccctgaatcatatgcaaaagaaatgatttctgggtattggtttgaattgcaaaatgcaatttaaacattctgtagtcataatttgatccccaggtcacaacataattcattttaggaaaaaagaaatcaagtgtaagactgaaagcaaggatgcattaatcagggttgcctattatttcttcctttgatctccctgaccgtaatattactgacaggaattcagtcatgcagtgggaggttacagggccctttgtaaaaaaaacaagttttgtagatgttttaaattttaaaacaccacagtccttttaaagtcattttgcacttaaattattcaatgttggcagatagtttaagtcatctcattaatggctgtatctgtgggttgtttttttcctctttcatgtaaatcataacacattgtaatgatagggtaggtcatgtagggtttctggaggccaaaaactttgaaagaaacacaaggatttttagaaatggaaagcttcattttacatttcactctgaaatatatatttaaaaaaacatgagattggcatcctcatactctgattaaaatagattctttcaacaaagtatcattttagttatggcatgtatattatctgattttttttcaaaatataagaaacttcaatttatttcctgcagtaacagtatgtgattttttaaaatacatattcacactgataaattaatatcattaaccaaatgatcatataattttcattcatcacctttgcatgttaaaaagaaaatatattgcatcctaatacctttcactaaaatactgcagaagtagacaatgttaataagtatagtgctcaggaggcatgaaaagagagtactgggagtcagcttgagaatgcacaataaggattagtcacattgcttattctgcctcatactccacagcagctaactaaatctgtactgtatttgtcattaacaacaaaacaagctcacagtagaaaaaggagagaatcattaaatggtaggaaaagatatatattggtcatctaatacaacagtttgtaatgagaggagcagaaattcaaggaatctgcagtatgatccagtgatttgctgaaagaaagtattagatatttcaatcacttgtgatacattgattccattttcatcttattttttatattttaaatgtgtaaatttgtttgtacaggtagtacatgaatatgattatacattatatagttgtacatgaatataatttataaagaatattaatatgctatatgtgtatgctgaattactttcgttcttgaagatgagaaaacaagtaagtttaggaactgaagggataatatatttctcttcttttcggcaaatcattgagttattcttcatgttgtgcctggagagggaaagggcaaaaaaggtcacgctacttatattacttaggactgagtattcaaagtgtattaatgacaaaaatatttttaacctccagtgagcacaaaagccaattgttaacaaaataaatacttaactggcttctcacaaaagtcagatttcaaaatagcacatggtattcattttttactgctgctataacaaatgcccactagtttaggggcttgaaaggacacatatttgtagaatttgatccttctggagggtagaagtctgaaatgcatcaccagggctctgtcctctgcaggatccagggagactttgcttccctgcccttcccggtttccagagactgcctttctagacgtcttcaaagctagaagcgcaacatcttcaagtctcattctctacccctttgcttctgtaattacattgtcttctgacttacccctttgcttctgtaattacattgtcttctgacttcagaggggcccacctgggtaatcttggttaatctcctcgtttaactttatcacaactgcaaagttcctcttgcaatatcaactaacagtcacagattctggggattaagacatgaacatctctggagaccattattcagtcttataagtcatttttagctttctgaaatcttcctgatcaaaaatattttcattttgttctaatatccactcaaaaacctgtctttactctcttccttccattaatctcttcaacagtcatttaaaaatcaagttacttttctacactgaaagtgtaatcaaagtgtcagtaatcaaagtgtcagcttcaacattttcatttctttgaaaatcccaagaagactttgtttgaacaaagcattcttaagtgatggaaaatttactgaagcttttgtagaaaagaaagaaaaagtttacattatacctgcccattatgcagcaaaaaaccttaaatgtgtctcctaaaagggaagctcaccagaaatctgtggctttcaacaccccatgctcttctttcaactcttgcctggatgtaggagcactttaagaaaggagcaaaatgcccatttaaattacagatgagctggctcagtatgtgtttacaaatcaaaaatagatagcagcttctgtatgctgctttctggggtgatcatgaaagacagagctggggaaaatgctcccagtgggcagagtttcaggagcagcatcttatcatgtactttatacacacaaaaaaggaccatggtattagcaagtctatggccttacggccagagggtaaggcctggctagttgttcagaggcttagaaagaaaaggattggaaaatatgaggcaaagaactcagggttagaggcatgaagatagacacatgggagtgggcacaaactatgatgatctttttataacatattaacagataccaaagaacattttgtctcagttgttgaattaaataaccaactagacaaaatgactggtaggttgacatccatcagcctctgccgttgactgcttcagaattaacacaataggcacgcaaaagaagtggtcactgtagtagacatggaaaatatgaatgggcccaacagagaggattctcacttttcatggataatctagctatttccattgccaaacagccaacctgatagcaataagcactaaggctgacccctcaccacggcactattcttctaggccaccatccagccacttgctgggaaagtgaccaccttaggctctttcatatacggatagccaccagtctattctcacagaaatataaaaagacattctggagatcgatttctcttgccctaagagcctcaacaagcaccactattttaccatttacggtgtttaatttactagccaggatcctgtctaatatcacctgagatcaatggacccacttttcaggatataagtaggccctgaccttgagatccactgctcagatcacataagatcaccacccaggacctgctggcctgatacagaactgaagcaatggcggatacatttctgaatccccagtctagaggccatattctgtggagatgagatgctgatatggtttgggtctgtgtccccacccaaatctcaccttgaattgtgatagtccccatatatcatgggaggcacctggtgggaggcacctggtgggaggtaattgaattatgggggcgggtttttcccatactgttttcgtgatagtgaataagtctcatgagatctgatgattttataaacaggagttcccctccacatgttctctcttgcctgctgccatgtaagatgtgccttttgccttctgccctgatggtgaggcctccccagccatatggaacggtgagtccattaaacctctttttctttataaattacccagtctctggtatgtctttattagcagcgtgagaacagactactatagatgccatcctctaggaggtaggatatacattgcatcaaacaccattatgtgattctgtggcctaaagaaagagtacatggttttgtgatataaggaagggaagcagaggtcattattctcatgacccaccatgggactttgtacttcccatgcctgcgactctggacgctttagagtagacatccaggttccccaaggggttagaaaaagcaagtttccaactgagctagaaaccgggcacagctgtcccctgggcactctgaggtttttgtttcaaggacaagcagacaagaagtggagtcacaatcttggcaatggtaattgaccttcatgttgatgaaaaggcaaaagtggtgttatgcaatggagcagtgaatattcgtggcacccagataatctagttaagtaggtcttggtaattcttcacccaattgtgacaattgcaaaaagacagatacggcaatctggccagagaagctgtgatgaacaggaagtcacaccctcagggatgatggtctcggtctcatcatgaggtaagtcatcggtgaggccagcagagggagtagctgaggataaaggggaaagaaaatgaaaagtggaagaaggagtctataagtatcacttggtccctgaaaattaagtacagcaccagggctatagttcacttaactaatctgttatacttttactctccaaaaaaaagagtgtcgtgaattcatggagagctaattgctgaaagtatatgaaaaagtgaatccgagaggcaaagggagtgcattgtggtagtcagggggatgttccttctagatgccccttcgagaaagtgctcgctgccaggcttcagggaacgcagtctgtagacatctccaactgtcacctttctgtggtttgtctcagcggcagacagctgcctccctgaaggtcacatgtcacccaggacagtccatatccagttataagcggaggtgaggatgtaaaggcctggacatttcatctcgatagggaacaacactggcaagcgatgtttgctctggagttccagacaacattgcccagaacattgtcaggcttgcattgcttgtgcagctgcccagtggacagaaaactgaggcaaatgcaaagacatatacctaaaggagcagtgctgtgacttcacgctagattcccggagactttccattttctgcagagtcccttcagcagattggttacccttgaattctgtggcacagccctgggtactttcataaaagctccctgttcacctactccctcctttccatcttggtagaaatggatttctactaatttcaaccaaaaattcttaaatttaggcaaacagcctatttttcgcttactcatttatgtttttctttcataaagtccactttttatatgaaaaaatataccaatttatttgggtttctgcagtagataactttcaggtatttgcttttctcatgcatttttatggtatcactttcttcactttatagaaaattgtatagaaactgtactacctttgttttattatattaaattatttattacagatatagcaagaaaaatattttattcatatccattattttcaccaaccaagaatatataagaatatccccacctgggcatactttttacataagcactggttaaatctaggcttgcccatatctacacttgacaagtttatctttagagtacggtattctgttctattctcataagacaattgcattcatagaacacaggtttcttgtatgcagcctcaaataagattattgcttagttttctgataatttaaaataaagaacaacatgatgttgagaattcactatttccaagaatattctcatatccaccctgctgaaagtgattttttttttttataaaattgcttacaggttgcaatactgtatacttctacacaattttcagtctttctgactctctgcagcactgatttcttagaactgaaatccccaaatggctgtaaaactatgggcaagggtacaaaaacctcctcagaatgtatcaactgtccatcataatggtaactatctggttttccagttagtagaaacctgggttctctgggtcagactttaaatgaaatttatttctgtcttttgttgtggactctgctccactacataagtaaactatttccaagtgcataattacttttcccaacctagttccattaaccttatagttagtggaaatatcttccaacttccaaattctgatgtcagttatctcagtgtttctatgctggtgtttggtttgtttgtttgtttgtttgtttgtttgtttgagctagcttctggtctgaggctaccacagctattttgaagtcaccaattattataataacctttatatttacctcttggcttgtgccagttcttaagctattgtgtctctgcttcaaactcagctttctgtattcagctttgttattctaggaactctacaaaccatcgttcccaattagctagctggtgcctccgagttatgaggaaacatggatgaaattttgaaatgacatcttgattgcgaaagaagtcagactcccccagaatacgcatgctacatgatttcatttatgtgacaggctaaaattgggcaaaataaatttaaggtaatggaaatcaggaaacgtttttgtctatggtgtgtatggactgactataataagaaagcacaaggaaattttcttggatgactctatcgctattgagatatgtatggaggtatgtacatttgtaaagctcatcaaattgtatacttaatatttgtacatttcactgtgttcagattttaattcaattttaacaatgcctgatataattgaatcagggctaagaaaaaaataaactacagaaggtaaaaaaggcaaaaattcagagtaatagtttttttgtttgtttgtttgtttgtttttttgaaaccaggtcttgctgtgtcgcctaggctggagtgcagtggcacaatctcggctcactacagcctctgcctcccaggttcaagcagttctcccacctcagcctccagagtagctgggattacaggcgtgcgccaccacgcccggctaaatttttttttttccatgtttagtagagatggggtttcaccatgttggccaggctggtctcaaactcctgatttcagctgatccacctgcctcagcctcccaaagtgctgggattacaggtgtgagccaccacgcctggctgtaatggttatcttttgagcaggcaggtagtgatctgaatgaagtattatagaaacttctggaatgttggcagtatttgcattcttgatttggatgctagttttgtgggtatgttcaatttgtgacaattaaatatatatattatatatatatatatatataatatatatatatatgaagttgaaatggcctataaatacttgttttctaaagccaatgatgcaatattcaaatacttcttgaattattgtactaaggtaatcattcaataatacagtcatccacagattttattattaatagtaaaagaaataaaaagagcacactaggggagatgagtgacaaacaagaggaaaataaaaggtaactttgtgagaggcaaagttttgaatctcaaggagtagtggagtctgttctatgcttcatgtgatgtggcaataaatttcagctctgccctcctggctgacagctgttttcaagatgagagagagaaataagaatgattttttcttgaagaaaacagatggttacttaggtgtgtaaattttttccaacggaagattacaaaagcggaaagacaggtgctttgtacacagtcttttgttttatacttttattgaaactgttagctgcattgccaactgtcattttcagttgtcactaaagtaagcaatgtaaaaatgagaaataaatattatggtcactaaaactgctgttgtgtttgatgtgtatgtatattgtctgttcgatagatgtttctctcttgttatatgtttatttttcaattttacacatctgtctatacacattgtctttccatatatattaacatatgcactgttaaacgattattggcataactattaataattgcagatctgctataaaaccacagccaaccaatttttctacacaagagaaattagtttactccagtttagtaactgagctacattggtatatagttgtaagcccttacgttattgcaaaggtgttttagcgatttagcaatattctttgtgatctttactggagaggaaccaaaaatactgaggctgttattctatgtaaatctgttacccttactctctagatttctagctaattccttcctcaggagcagtcctaaattgtactctggtacaacaagagacttaggtgtaggcccttgttgaaccaggttcctttaattcccaaaagacaaaaaataaagaagccatctcaatccctctcttcagctctttctaataacatggaaaatatttcagcaacgggcttacttaaatgacataccagacagttcacactatcataaaattctcaatatctgagtcccctccctttatgacaggagtagtgatgggaacatcaagtcattgagagtagtgtttaaagttcatcttctggttgagccagggagatgaccagtttctcagtgtttaaagttcatcttcttgctgagccagggagaagaccattttctctggaaagtttaggaaatctgggaacgactgaaaaaacaaggttaatatcagagtaatgccctttaatctaacccataggcatataggataccttaatttgaacagaatgatcgcatccattctgtctttattaagcatgagctattgaaagttctgtttacgttggcttatataccaggagacacatccagtcactctccaaaaaaaccaagcacacaaaccaaaacagagaagaaagaatccagtaaactacaatggtgtcatcctacccaaggaatttgaaatgtagcaagagtaacacagctgccataggtacctcagtgttgaaacaaacaaatgctctcctcttaatttgggaaacattatattctcctgttcttaaaaataaaggttgttttcagtaattttctgttgcattatctctaaatactgaagcatagttggggtatatatctactatatatataataaatatacatatatacttagctttatgtatatacatacattcacgtgtaaaaaaatacatacatagatatattttatatatatattttatatatatatataaagtatgtatatatactaaacttgaattgggaacacgatcttctaagcatgtacataactaaagatatctatatgcctaaatacttctctagatacttaaatatgtatttcctttttttgcattgtgattactataactctagacaacttccagccagaacaaatgttacatgcagtataacgatttcactttcagtataaagatttgagactatattagctgaggaattatgtcaactcttcattttattttgaatagaagtatcaatcactacatgaacatttacatgaaaacagtgtaacttaatttctttctgaaacagaatgttttttatattagagcatttcatttgaaatttaatatctgtgtataactgagtcacttttataagctatattaaacttgtacgtcatggaaatagacatgaaaaaccatgaataaaatacagaaaataagttattatcaaatttctttttacaagaatggaatattaataactaataattgaaaacagataacctttaatcattatttaatatgtgttatgtgtttttctaagtaatttatatctcataattaatttaatctttactacactcctggcagatagatgattttacaaatgaatgacatagggcagagaaagaaaaaatatttttctcaagtttacagctgatttgttgcataacaggaatttggatcctgactttgcagctagtttaaatcacaggcttaattctgtgccgtgtactttctttacttctcttgtaactgattatgtttctccagatttgtattttttaatctatattagatttactttctacatctttcagttaacatgttattaaatttttcaaaagttttaaaattatgtgtaattatatgtcactttcaaatttggggaaataaacttggaatgtaaataagtatataatacaattagaaacaaccttgttatttaaatgacttcactactatggatcagaattgttttttcatctttgagacaaatatattagaggaagtggcaaatgccctactatttagattctgaaaaattcaaaagcaatgattcaaaagcaaaaattcaaaaccaataatttccttaacatgacatgaggaaattttccgactttgctttctgctttcgatgattggtgatatgttggggaagatgaagtttatgcaaactgattcctgacactgtcctatgactttaaaactattcctcatctagatcttgctttcaaaacactttgtaaattataaatagcgacacaatgccccaaatagtaagtacaatgtagagacctacatgatatgtattccctcaaaataacaactacaaataaaataccaagatgaatcataagtttagctattctttctggaaactcattccagaaaggaaatgtaaagttttcgacctttaatctcaccctattgcactctgtgcttgaagtttcaataagtttcaagtgacacatgagactagctaggagacaccgttaagtgatgttcacatctcagttcttaatggggactttgttcttctttggatcttataaatggcatttctttcttattcttccctcagtgatggctctaaatactttggaagaccctctaccaatcactcttgtcatacttcatgatgaatagcactgtgctgcccagaaaggaagaaaccaaatgtgtttgcggcaccgacctagaggcatatgtcaaaatatatatgtacaaagccacaagacttattaaagtcattgtcaattttttgcccttgaaaatttacaattagctacatgggagtataaagtcattcatccaactcttttgactcattcttctatattgctttctctttctctctttttcccttaatgagaaggataaaaatatcgtaatttagatgtgatgcaacatttatctttgcaaggaaagagactgataacactgacatttcaagtaaagtgtaatttcttcagaaaaaaaagacaaatgccatataaacacagcctgtcaccaatcttaatctttagaaaacaaggcattaaattccaccagaaaatgatcaattacgcttttcctattgagagacattaattttattatcattcatctgtgttctatttatctaattaatatttaaaatattgatatttttaacaattaattaagtttcctgtacacacatatacccaattttctctatttttgatattttttacctctcgaatatccaaaaatgagcttaagttagcatactaagattatgcaaccttgtttcaatttctcttgataattatccatgaccaattcaacaaaatttatctctaaaatatttgcctgccttcatgatcgtcatcaatgctgtcctataacaatctctcatcagctttcacttggacaacctcataattgttctttctccatttggcccccttaaataaatttccatcaagcctcaaggatgatatacctaaaaggatatatacacctaaaaggatataggtgatacacctaaaaggatgatacaccaaaaaggatatatttccatcaagcctcaaggatgatacacctaaaaggatatatacacctaaaaggatataggtgatgcacctaaaaggatgctacgccaaaaaggatatatttccatcaagcctcaagaatgatacacctaaaaggatatatgatacacctaaaagatgatacacctaaaaggatgatacacctaaaaggatatatatacacctaaaaggatatacacctaaaaggatacacctaaaaggatatatgccataaccctgatttaaatgcctaattgtcaccctggcacatattatgatagttcatcagtggaaaggcttagtcggagaaacttttcttttttttttctttgagatggaatctcacactgtcgcccaggctgggttgcagtggtgcgatctccgatcactgcaacctccgcctcctgggttcaagcgattctcctgcctcagcctcctgagtaactgggattataggcacccgccgtcacgcgtggctaattttttttttttttttgtatttttagtagacacagggtttcactatgttggccaggctggtcttgaactcctgaccttgtgatctgcccacctcaggcttccaaagtgctgcaattacagacgtgagccactgcatctggccagctgaagaaagttttttccacttgaattttcagcctaccctactcctttctctattattatatagcataagcttagaagctattcctttcaatagtctcctaggcaattctgcttctaatatcatcactataaccctttagccatccttcctcactctgactttactgacaacagtcaatctgctaatagtgacaaagtttttcattcttccatctctttgtatcacctagtgtaactctcatcactctcaaactgccactttacacattattaataaccaaagaagtggttattaatagggttagggttaattttcttagcaatggttattaatatggttatcaatgttggcacaatgataaccaaataattagctgttaataatttgtaaagtggaagtttgagagtgatgagagttaaactaggtgatacaaagagatctctctgcgaaccatatttatctaccctttcatgttaatatatttgcctacaacaagagtcagtcctctgcctgtgtgattttgttagaacacagttacacttattgccacatatgttgttaatgtctatttttgcactacaagagtaaggttgaaaaatgtaaagaccaacacatggccttcaatgcctaaaatatttgctattaggcctattatagaaaaagtcccaacccctgacctacaatgtacttttattccttcaactacctaatctctacttacattcagatcgagatgcattagttctacatgaaaacaaaagaatatgcatactgcccattgaaatggggttaccaccacttctctaagcaagcctttttttcctgaacagtcatactctttaagcatacatttattctatagaaatttcctgtttatttttctgtctttgctgtattctcctttgtaagagatacttttcaattttctatctgcatcacaaaaacctagagcatagcaagcagataatattgttgcagacttgaaatggcaggaatagtgctggcaagtgaagatcccaccattattatctgcctaaagtcaaagggatgacaaagtagtaggaaaaatgttgtgattacaatttcttacaatacagccttataatggcactagttgaaataacgagtaaaaaaacaatggaagttaataaagagaaaaaatctgattaccagaaagtaagtctgtcaggaaagttttgttctaagaggaaaaaatagatttgagatcccaaccatgtgccaaatgcatcttgctaggatggtattaatgatccagttttcttatttagctaaaaccctaagaaaaggaataatatatctatgcccccaaactaggaaacagatgaatgttacattctgtcactttctgaagttcatggctctttagactagatgagaacaagttgcccaaaaatctcttttcccaaagcagtgatgtgggatctgaatggctattaaacaagctcaagtgtggaatgtacacatgcaaaatagtttgatttatctctttttactgccctagaatgtacagttttacattttcctttcctaatgggaagccgattccttaatgatatcttaggatgctaccattacttttcattcactttgatattctaaggattctgcccagcctggatgaaaatactaacctcaacccttctcaaatcctgtctcctacccttccctcagtaggctcgtacttgggaatgtgaagtggatgaggaaaggtagctgggttttcactaggttttgaactacagattgttagagtggtggatgaggggtggggagggcatgatttggttctaggacaaacttttctctgttaacttccagtatccagttctctcttttttatataacagcattttaagtattgttaatatatctctatcctatctctcagttcctgcattaagagaaaaagactatatacaaataatatatccctcataagtatcaaactcaataaataaatgtacccaataaatacagcattggaatataagaatatattttagtatatttgttaactatgtaatttgaatagattaactgaatacatttttaatgtattcaggaatgtgaagaatacattcacagaaatacattttgaaatgttctgccatattttcaataaaagacatatgaacaataatacatctgcagggaaaatagtcttgagtttttttgtttgtgattaaggaatttataagggctttttacatcctctattggtttttgaaggctgttgataactctgggtttgaaggtattctctcctccttttcaagcatacgactatcccttctcattctggagacatgggctgcttaaaccagcatttcaccctcaaatatttccagcaaagaaagaaccaggctctgtgctcacagttttccccaacaaacaggtgatacatgtcaacttttcctatgaatattctacccatactgtccccagcctggttatattgctaattccacaatttagcaaactccttgccagagatcaagatctcagtgtcctctacctgtatacaatgcagccatcaaaaagaatgagatcatgtcctttgcagggacatggatggagctggaggccgttatcctgagcaaacacacgcaggaacagaaaaccaaatactgtatgttctcacatgtaagtgggagctaaatgatgagaacacatggacacatacaagagaacaacaacacacactggggcgttttggaaggtggagggttgaaggaagagggtcaggaaaaacaactgatgggtatgaggcctaatacatgggtgatgaaacaatctgtacaaccagcccccattacagaaatttacctatgtaacaaacctgcactaatacccctgaccttttaataaaagttaaacacatataaatatacatatgtatataatctcttgatattgaagagttcgtgtgtatataatatgtattatatatacacaaagtgtggcagtcagggccataagaatgctcaggggaactcaggacagagcagggatctctgcaatgaggtgagacaagggataaaattaaggaaattatgttatttcaatgttaaatggtgacccagaaggcacagagcttgaggatgctcagatcgcaccagttattaaactctaactcaatatgaacatattttcctccatcttagaggctcaggatccttttttgttttaagagagaaagtcttgctatgttgctcagggctcaaatgatattccagcctcagcggaatacattttagtggctcattttcaagtcttaagagtttctcaagtgatcatctattctgttctgctaccctacatacacacacacacacacacacacacacacgcacacacacacacacttacttcaaaatcaagagattgccctcttccttggtttgggaaatggaaaataaaacatctcagaaatcccaaagcaacataattcttcatttacttttccctaaaggctatatagatggagatagataggtgcggacccggggtgatggttatggaataccagaaccagcgtggccatctgttaataaattctcagacacaattatgcttataatttttatagtttcttggtcatgtctttggaatataaaatattgagtgtctctttttcttcattcttgaattctagttgaaaaagccaaagcaactggaaagatccattcaaaattacatcttataagtattaacaatacttaaaaagagaggggacgctggttgagaaagtcacctggatctgaatagtaaaatatacggagacacaaaagtacacggtgtgttgaacaaccctgaatgcttagaattttggaatgtaaaaatcaaaaagtaaagaggagaaggtgaagagggaaaggttttcaggaaacagatgagcaagtgtcttacatgctctatttaaagtttcaaacatagtcaagaaatttgtttttttatattaaagcatattctcatctagatatgagagaaattttcagaaatgtgtctcacattatttgctttaagcaattctaccaaaattgaatatctttatccattggatctaaagagactcatggctgggcgaagtggatcacacttgtaatccaaacactttgggaagcccaggagggaggatcctttgagcccagtagtttgaggccagcctgggcaacataaggataacctagctctaccaaaaaaaaaaaaaaaaaaaaaaagtaaccaggcatcatggctcatgtctgtgggcccagctactcaggaaactcagtgggagagggtctcccaggaggctgaagctgcaatgagctatgattgtgccaccgcactccagcctgggcaatagagcagattgtctcaaaagatataaataaatgaataattacataaattataaagagcttcacaagtataaagggtaaaatttatgtaaaatatatttttattattttcacaatgtcttacttaaaacaggaaagattctcaacatgatttttatacactttaaattttagcatcgaaatttgaataaagatgttgaaaatagttcagtttacagctctgtggggaaactcccgagaactagatggttggaacaaatatcaaatcagaaagatattaaagatggctgaacaagagcaggccattaggtggaatatatagaaatcagttaacaccaaaaaaagtaagtgtgctgcatgttctgaagctataaattaccctgaattactcacctatctaaagaatatgatctctgtgggtttttaagtggatattaaaggaagtcttattatgcaaagagcagatttttataactctggaaagaatatgccaaatagtataaaaatctggaagcatggttgaataacattatcagtttccaaagataaaataggaaattctaagaataaaagtgttgtccatttttatgctacattctccagtaaaaatagccaatgtttcaagtgatgacaataagtagggactgagaagtataaatttattctataagtaaatgatattacattgtcaaagtgaacaatgtatatttgattaaaatgtacaaatatgaagaatcacaaagtggaatcttcataataagactcaaatattgaaatctgattaaaaataaatgaagcatgaacatgattttttcttttttattgataaatattctctgatgggaaatatctgttgaaattttttaatgtctaaaaagttgttttcatttgtaataaaatgaatattatataagcataaatattttaaatattaaatttaaaatttttatatgcttcaatattacattcataaaagatgtttaaagaatctactgacaagataatcagtagagatacatttatattttacaaattaaaaaagggccaggtaaaaggtaattttaacgtgcagataaggttttgaaaagaggtgaataagtctaaatacgtatgccaatgaaattgtctactctaattggataaattttattttgagatgttaatataaactttgtttaactcaggagaaaaacatatttaggcaaacactacaaagcataaaacttgctgctcaaaaaatctagatggaaagctagcctttagagaattattcaattaaagtataattttattttttttcttttttttaattatactttaagttctagggtacatgtgcacaatgtgcaggtttgttacatatgtatacatgtgccatgttggtgtgctgcacccgttaactcgtcatttacattaggtatatctcctaatgtttttctagtgtgttatattttagctgagagtaagaacctaatttcttagtggaaaaaagcaaatgtagacagtcaaggtaaggtgtttcaagtaaaggagaaaggaaaaggcaagcctcatggcctttgtatcacttggaagtcatactttatgtcatcatcactagtgacgacacacatctcttaatatcactaagtcctctggctctactttgtatgtatggcatgtggatatcaatcatttctaatatttgagttttggaaacaaccttacacattaagttcatgtaatctctaatcatcaaaaattgcaaagtcttcattgtgccctgcaagcctctactaatcttcaggttttcactagctctaaatttactcttatggtaatttatataaaaccatttcatataataaactgcatatataattgaaaaggatttgcaattatgataaaatagttatctaattgctttaattctccattattttcctagtatactactgaattcctgaatttccaattcaatgtgtgccctaactttaacagtgttactttcaacgacttactctccacatagattctcatgctatttaatttttgttatgagcaaatataactatctttattgagtcatgtaggatgttgatataaactttgtttgcagcttatctattatattttgagaattataatacaaatcataatacaagaggtatgtacaagacatgaagatcaaaaaataaacacaaaagtaaagttttaacccacaatttcacagtcttacagggaagatagacacatatcaggtagtataataatgtgtgaagtgcaataacaaagattcagataacactgtgagtccacaatgaaaatacactactcagacttgggaaatcagaggcggttttctaggtaaggtaatgactaagctggccctaaaagaacacactaggagaagtgtaatgtgggactggagagatgaaggaaaaggtgtctcaggctgaaagagccataggaacaacaagaaataattatatacatggaaaatgttcaggaaattaaaagcaggaacagaagcataaattctagaggaaaaagattcagataataagatagaagagtgcagtcatgaagattcctctcaactgaagtggttttagaaactgaaggattggaatgtagaaagatatttgatgtggggagttagggagggcgaggtgataaacattactccgagatttggactttgggtggaagatcataatggcaaaaaaccacataggaatacagaacaaaagggtactgcttacgtagtttatccattagagttgtaagactgcaatcaatagaagacaatgttggctatcttaggtagaaaggaaacttgttgggaatagtaggcagcctctaagatgttttccaatcatgtgaatcccctaggattcacagccttgtataattcccttccactgactgtgggctgaatttattgacttacttctaatgaatagaataagctgaagtgatgggatattacctcagggattaggttaacaagaatgctgtggttttaatcatggatgttctctctttccctcttagatcaccaaccctcgtaaaacccagctgccatgctgtaagaaaaccttgtagagaggcccacatagcaaatttggaaacaaactttctgaggtctgccaacagccacatgagtgagctcacctgccccagctggggctggcaatagctgcagccccaccaacagcatgattgcaatctcattagaaaactagagctggaggcacccagttaaaccactcccaaatccctgagctacggacactgtaagaaacaatcaacgtggtcattttgagttgtttcattttgaggtaatttgctttatatcaacaaataactaacacaggaagatatcagatggggcatagttagaatagtagccatgaaaataggacagcatccagaaaagaaaccgaagcaacaagaactgctcaaccacgcaagcgggatgccatcgttgaaataagtggacttcaagtttttggtccttgtattacaatatccagaatgatggagagagaatccagttgtctgtttcagaaacatgctcacccttagaccacaatatggtaaattaaaatacctgcaaaaatagccttttacattctctaaacactcctttggcatctgcagtgagagggcagagctcctgaactgacaaaaatgcattcaaatgagagagagagatttttccaaaataaaaccaagcagccatcaagaaagacaaactggtgttgggtatacaacacacagtgaatgcccactgtctggggaggaaggaatcaactattggacatagtaacgtttttatgacatctaggtgaagatgtatatgaacagtttaatatatgggtctaagcttaaatgagagaagccaggacatagttgagagtcatcagcacttagctggcattggagtaaagataaatttattgtttcatttgtgggaagcaggtcaaataagaagagactttaactgatggtgggatgctatgaagtaccaacaatgcaaagaaatatttcaaagaaatatcaacattttaaagaaaaagagaagcacataaagataataagaaataacagtaatttgagaagaatcaacagaatcttgggcaccaaagtcaaggagaagagaatttcaaagaagtgactggcagtatcagttgtactagaatatttcagtaaaatatcaactacaaaatggcctttacttttggaaatcaatgttgatagatacctttcctgaaaacacgtcagtcatatcaatatcaatatcaaaatcgtgttcataaaagttggtggctattccttgcacttagaatcaagttccgagttctaggcttactttcaaaattctcacataatatatctgctcaatttagcacctgtaaagactgcttatctccctggcaagattatatttcacttcaaagatggagactgtatcttgcttttctatctactataatatctaccctaatatgaagaatataggaagttatcaataaatccatttttgaaaaaaggtgtttacattgttcattctattacatatcatttatcttcctctctatttttataaaacctagactgttaataagccaacttgaatacagtttaaattaaaagctgacactaaacaaagtctttctagttcacttgctctctctcaagcatgtgtgtctgaatttccatggagtcaataaaacagagttatagagttcactatatctttaatcttttccctcttgtctactaattgcaaagaaagcagactgagtctagatactgttaggctgtttataattatccacctttgcttgactatgcatcctttctagtacagaaaaccaatcaacaaacaaacaaaaaaaacaaccaattgtcactgtgtgatttatttcctaaactaaaccaccatcaaacagatagctacacaaatataagcaccactttttaacaggcaacattaagtaatgtgtgaaaaataagctttaatattgaaaaaaagaagtaagcctaaaaaaatgttgtaatgtgtgcaatctacaccatttctgtttttaatttaagaggtgttatgtttgaagatttactggtccattgtaacagcagagcaaaagggttagaggagtacttggggtcaacaagattccagtttttctttactctttaagccacttttctaataatcatgcaaacttggggaaaatatttcataaacctagttttaaaagtaaactctttttagtatttgttttagttactttggttatatatttggaagatcttttcgcaggttaatagaaatactgatttgtttcagtgtctcccaacgttaatattttataagtcttacatgcaatttgtgacatgacttatttaaagttagcgggagagcagccatcgtcctttgccaattccagttcgcatactaaatgcaggcattctcatgcagtacagcacctgcataaatttgaaaaattgagaatcatgaaaatggtatttcaatagcagttcagttcagcaaatggacaaaatttatcatgcgacataacaccttgaacaaggttaatgccctgtggaaaccatatttccctgaaaaagattttgttgttgatgatgatgattttcaataaacacatacataatccttcaattgcacatttttttctctcatatctagatagtgctaaattataggtcaatatcataaaaagaaagaaaaaactatagctacagtaaaaataatgtataagaggcatgtaaacaaataacacacatgcacagctaaatgggagagagccaacaactctttttaaatagtgagtatctgatggaattttattttacaaaatgtgttaatgcttgctaatgtttttaatatttttatccattcccaaattcaaaggtaatgacaattctgacaagacaagaaattatgatatagttacatgaattatacagctaatagtcattttgtgctctttctttttaaccagggaaaactgtcccattttagtacacacacaaagagagagacacacagaaagagtgagagacagacagagagaagtacacacacatacacacacacacacacacacacacacacacacacggagtaaaatagtctgcccctactgtcaagttaaaaattatcaattatgaggaatttggcaagtgtggatactttgcagaacttgaaaacgtgtaataaactttaaaagtttgtctgtaataaatggtttcttgatctgtgctcccatcccatactcatcctctctttctctctctctcgtacacaaaccatagaattcttttcacaaggaatcaaagcaaatcaaattactgaaatttctggaagagctcaatctttcttagcactgaaaataacagatatgggcagaaaactttataggggactcaggaaataaaataaatatatttttgaacatagcaataatttttacttggcctgtaaaaatttgtaaagtttctattttgtttgattgagatggaagggttcatatggtataattggcccctatgtttaaaattgcacctatataaaattataatctgcaaggtaattaacgtagtactttgtaattcctatttttacaatttttttttttttgagatgaagtctacctctgttgcccatgctggagtacagtggcgtgatcttggctcattgcaacctccacctcccaggttcaagctattcttctgcctcagactcctgagtagctgagactacaggtgcccgccacgatgccccgctaattttttgtattttttagtaaagacagggtttcaccatgttgggcgggctggtctcgaactcctgaccttgtgatctgcctgcctcagcctcccaaagtgctgggattacaggcgtgagccaccgtgccctgccttaaaaattaatttttaagatgcatgttaaaaaataagcttaaagcagccgtttttcaaaggagaagtcaaaattctttagggggatatagcaactacagttgtcccagtaattgaggggaacgtcttcctcttcagcttgatgactaccagggagatgacaaaagaaagtctggcaggctttctgcgacccttctgcttgatttgatttaacaattatttaaacgttgataagtatctctggaactattttaggaaattatatttgaactttgaatctttttattgtgcaagaatgtatctgtgatagtatgcataattttctatacatatgtatcttatgtgtatatatatgaatacacaaatgtatacagatacattcatgggggatattggaactgcctcaagtgcacatatacacacacacactcactctctcacacacacaaacacacaagtaagccttcattcaatggtttaaatttcctgtggaatcttgtttaaaggattttatggcacaatttttgcacgttaaaatggcataagattttctttaataacattttatttagatactgtgaactaggtagtatgagaatatgatacatttctcatattcaactaatacaggcaagtctaatcttattaacagtgcataattgaatgtctatgacatgctaataggtaaatgtattattgctattaatacaaaagtgacctgaactcttattacatgtgtagctaacatcctgcctatataagaagaatatagcttattatcctgatgacatagaataaatataaaaataaaaacaattttatagtttgatagatagtggaaagacagtattttgctttggaagtactaagagatatgaaagtcaatagtgccatctttgtaccatttatctttaactatttcttctgtcagatactggtgacagaaaaaatgatcaagatgtctttcttccctcagaaaatctagagtcttattttcatgttccctattttctgtccttctctcccaaacatattttccctgcttgccaatatttcaccttcgtttctggcaacagacacaagcacattcatacagcagcattgtagaatttccttaaagcgaccttgattgtgtcaagcatgtcaatgacaatacttttgtggtagtctctttacatcctaagtaatctaggactagctgtagtcagagataattcatttataagaataagaaaatgcttaggagtcgatgtgttttctctaatgaatagttcaaaaattcatttgttttagaaatagatgtgttcatttatgcctttattcactttagaaatatttataatctgatctatctgggctgaacactctgctatgaatttaaaaatcagaggatatgagtctaaagtagagacaattaagtgaacaagtaaaatataaagaaaaaaacggctacagaaaataatttcagacagggagagtgtgccaactctttctgcagtgttgcaagaaagcttctgtgaggaggtcataattgagttgattatttaaggttgagtaggattttaccagatggtacctcacattggggatgtgggaggggaagtcacttctgccagaggagaaatcacatgaaaaagcgtagaagagagaaaggataaaaattttagagacttgaagtatataagaagagacttgtgtgttaacactaagatacataaatcctagacaataggaggtatttaaaacataaagtaaggaaatgtcatccttaatttttgtttcatattttaacttttaaatccttgagtgagcattttaatttcgtgtttttagttataatcctcacactttatagggaaaatattttgagtcatgtaagattggcattcctctggagtgttttcataatatactgaatctcatttgtcctttaatttatcagactaaattgttatttcttgcttatagctttacatcccttgtgattcaaggataagaatgatatttcttatacacttagagggcccctaggatttcaaatacaataaaattgtaacaattatttggtgtataaatgaatgaatgatccactcttcctctctctttgctcctgggaagtacttgctccttatccagtatcttacatctcagtaaaggccaccacaatttaatcaattgcttgggacatttacctgggattttgtttttaactcctttccttcacaacacacattaatccatgagaaaatcctattagtttttttcttcatattatgtcatgaatttaacaacttttcacatgctcaactattgcctgaactattacaatttcttactgactgatgtcctcaggttacacttgacagttcccgtagaggagtgttatcttttaatataaatgtaaatctgatcacattgctgtgttcctcaacatggtttttttggttccacatctgtctatgatgtagaaaactgaaaagagcatcattcccacttaaacaattaaaggccagatacactacaaaattaacgctttctttgaacccataagtcaatttctactattccacatataatatttaacattcaataacaaaataagcaataattaaaacacaaaaaaaggaagaaaaaaggattactaatagacaaagcaatcactggaaccagactcaggaatgaccccatgttggaattcacagagagacaatttataataactataattaatatggtaaactaccaagtgcagcatggaaaaatatatggggaatttcaaaagatacagaaaagatatttaaaaaggtgaaatggggatgctaggcaaaacacagacactagacactgacaaacacacacacacacatcagcactactgagaatagaattacttaattggaagccaaagcaatatacgttacacaaacaaaacatgagaaatatagtatctaaaataaaagaactgtgggacaaaaacacacagcgtaaaacacacaatataatctgcatgcaatttgacagagaagagaaaggatggatgagaaaaacaggacaccagaccccccccataaaagcgcattcacacacacacacaaaaatgaaactctgtggaaaccgctaatataaaagtaaatataaaaatatttgtttttcttatgttcaatgactctaaaacagaggtcctcaagcaggaaaaattttgcccctcagagcgcatttggaaatctctgtaaacactttttatttttaagttggagagtagggggtgctactagaatctagtgggtagagacaagagatgttgctaaactatatatagtactataacacaggacagctcccaacaacaaagaattacctgatccaaaatgtaagtaatattggtactgagaaaccctgttaaaatatagttgatgttctaaaggaaaatgatattgttttatgtggctttataacatagttaaaattaaaatgtgtgaatataatggcacaaaattgggataaatggattggaaatagaaatctgtgaagttttacaataaaggtaagatgacataatattatttgaagaaagcctgtaatattaaagatgatattgtaaatccaaaggtaaccattaatattgtttttacaaagataatgtgtgggtccaaataataatgaaatattgtaaataatatttaataaaaaataaacaaacacacgactaatccacaagtgagaaaaaatttttaaatggaggtcaggggatggaaaaaaacagattgaatagaaagaagttactaagatggtggatttaaattcaactatgtcaaaaattatattaaatgtaaatggtctaaatacaacaatttaaaaatatagatggtcaaatcagataaagccatattaaatacaaagacatatacaagataaaagtacaaggataaaaaaataaataccatgcaaacaataaacaaaagaatgccatagaggcaaatttttaactgacaagcttgacattagaacaaggaatgttattagcaatgaattgtgacattacataacaataaaaaggttaattcacaaataaaaatgtttaaactttataaatgaatagaactgaaactagaaatagaaaaatgtacaattattgttgaaaacgtgaacacttcactcttagtaactggtataccaaataaagagaacatcagtaagaatatagaagacctgaacaatgctctcaatcaattgacctaattaatatttataccatactcattctaaaatatcagagtatatattatttttatctatacagatcatatttaaaagatagatggctttctcaaccaaacaaaaccacaaaaatgtcaaaataattaaaattagagcaattgatgttctaactttaaaagaatttaaccagaattcaatagcagaaatctgaaaaaatcccctcagatttagaagctgaacaatttgtttttaaatggcagatttgtcaaaaagaaagacaccaggggaattgataaatacttatttgaatgagaataaaaacatattaaacaatattaatttagtgtttagggaaaattttacagccttaaaagattacaatagaaaagaggaaggataacctctcaaatagaggtttaaatgttcaccttaaaaaactttaaaaagaagagaaaattcactagaataaagtgaaaatatacaaacaatgaagaaaagagataaactaaattaattttgtaaaagaaaaatgatagagaaaattttgtgtaaaatctggttatttgaaaagatcaacaaaatttataatcccctagcttagagggaaaaaaataaagaaagaatacataaatcatcaataccaggaatgaaacagtggccactgttatacatcataaagacacattagaagtataacaatacactatgataaaaaattaatacccctaaacttgacaactgaggtggaacagcaaatttattgaatgacaaaaattaccaacgctcactcaagaagaaataggtatactaagtagtcataagcctattacagaaactgaattattaaaatattttctataaagaaaacttcaggctcagatgctgtgaaagcatttgccaccaaattttaaagaaaaaataatataaattttccaaaaacttttctagaaaatacaagcaaggaaaataccattcacctcatttaatgaggccataattatcctaataaaaaaaactaatgccatctaccaaaaacatacaaataccatattgtacaaatattatatgtaatgaagaaagactgaattcttatacacaaagatcagaaacaatacaaagatgatcattctatacattcttaccacttgtattcaaaactgtacagtgcaaaacattgatgagagaattaaagaatatttaaataaaacatatttgtggatttgaaaattcaatattgttaagatggcagttcttccacaacttatctatccattcaatccaaataccatcaaattacaaaaaattgtttggcttttgtttttagaaaacaacaaatggattctaaattttatccagaaaaagaaaggaattataataggcaaaacaattttgaaaaataataaataagagtaatctcttcaaagactcccttaaaaaataaagtaacaagccattgactggagtaaattatttacaaaacaaatttcaacatgaacctctaaccaaaatatataagatattctcaaaagtcaataataagacaaaaagtagttcaattaataatgggcaaaatatttaaacagagaattgatttcagaaaaagatacatgaattgcaaacaagtttttaaaaagaggttcaatatcattaacctatatggaattacaatgaaatatcaatatgcttgcaagttcacacaaaattttggcttgtggtttcttctagaaatgttagccttaactttcccactgaatttagtgatccattttgagtaaattgataaaagacacgggtcaagtcaatgctttttagttttccatactgagatcaaattttctcagcaccacctgttgaaaaggctattgtatttccatttgaattgcctttgcatctttattgaaaattatttgactaaatatatctggtctatttctggaatttctatttataccattattttaagcttcaatctttttgtcaataccacgctatcttaaatattgcagctttataatatgttagaatcaattgtcatgactcctttaattttattatactatttgcttttactttttacttatttttttctcatgtattaaaacacaaaatccataatggcaaaggcaaatattgtctatttatgtcgattttgttcactccattttttctagtcactagaataatgctaggcatatgacagatgctcaatgaatatttgttgaatgaacaacaacatatgaaaagcctttttaaattagaagcaccatatgaatgaagatatttgttatcatcgtaattttttaagaatatcaagaatctaagactgcttagacttctaaagttttatgctgcatgttctttgagtttgtttgtatggactcttttggcagttgtatgacagctttcatgcccttctcagaatatttttacatccttataataaactcttaagaaaaaacctacaaatatgttgaaataaagacacaaaataatttataaatttttttgttatactaatatgagtgtctcactcttaagtacattaatatgttttagcaagatgcagtctagtaatcatgattgcaaagtagtgatgaatgtaattacatgaatatacaatatctctaatgggatagtgcaaggaaaatatgtatgattttcattggtaacaaagtactccaaataccactgtgatctgttatcctcagttatgattgaaataaaaaagatgttaaatttcagttgaagactggagaaggcaaatgtataaggtttttattattttcccatctgagtttatgaactcattcaggcgtacctggaagatattgcagattcagtgccagaccatctcggtaaagcaaatatctcactaaagcaaatcacacaaatcttttggttgctggtgcaaatagaactcctgtatacaatatatagtagtctaataagtgtacgatggcatatgtctaaaaatgtatataccttaatttagaatattttattcatacaaattatttaataatcatgtgagccttcaatgagtcttttgttgttgtagttgttgttgttgttgatggagtgtgtcaacatagatggctgctgactgatcagggtgatgtgctgaaggtaggggtggctgtggcaatttcttaaagtaacacaaaaatgatgtttatcagatcaattgactcttccttttaggaaagatttgtctgtggcacacaatactgtttgatagcattttacccatggaagaactttcaaaattggaatcaatctttgcaaatcctgcctctgctttatcaactacattatggactattcttaatcctttgttgtcattttaacaatgttcacagcgtcttcaccaggaatagattctgtctcaagaaaccactttctttgctcatccataagaagcaattcctcatgtgttcaagttttagaatgagattgcagcaattccttcacatcttcaggctacactgtcaattctagttcttttgctatttctaccacatctgctgttaatccctctactgaagttttgaagccctcaaagtcatccaagagggttgtgatcaactccatccaaactcctgaaaatatcaatatgaatctatctcccatgaatcactaatgttcttaatggtgtctagaatggtgaatattttccaggaggttttcaatttacttttccacaatccatcagaggaatcacaatctatggcagctatagtcttacaaaataagacttgaacagagaaattactccttggtcatgggctgcagaatggatgttgtgttagcaggtataaaaacaacaatctccttgtacatttccattagagctcttgggtgaccagggacattgtcaatgagctgtataattttgaaaggaatcttttttctgaacagtaggtttcaactgtggacttaaaacattcagtaaagcatgttgtaaacagatgtactgtcattcagcctttgtttcatttctagaacacaggatatgtaaatttagcataattctgaaggtccctaggattattggaaaggtcaatgagcattagcttcaacttaaagtcagcagttgcattaatccccaccaagagaatcagtctattctttgaagccaggcattgaattctcttctgtagctatgaaagtcttagatagcgtcctcttctaatagaagactattttcatctacattgaaaatatgttgtttagaatagtcactttttatcaattatcttactaaatatttgtaataactttctacaatttccacatcagcacttgctgtttcatcttgcccttttatgatatgtagacaacttattttcttaaacctcattaactgatctttgctggcttccagctttttttttctgcagctttcttgcctctcgcagccttcacaaaactgaaaagagttagggccttgctctggattaggctttagcttaaaggaatgctgtgatttgtctgatcttttatccagaccactaaaactttctcaatatcagcaataaggctgttttgcttttttgatcatttacatgttagtgaaatagcacttctaattttcttcaaggacttttcctttgcatttacaaattggctgtttcacacaagagccttagctttcagtctatcttggctttagacatgccttcctcactaagctttataatcatttctagttttttatttaaagtgagaggtgtgtccttgcctttcacttgaacacttcgaggccatggtatggttatcaattgacccaattttaatattgttgtgtgcctcagggaatagagtagtttgaagagaaggagagtgatggaggatatgacagttagtagagcaggcagaactcacacatttatcgattaaatgtgccatattatataggcacagtctgtggagcctcctccctcccaaattataataaagcatcaaagtttgctgatcatagtttatcataacaggtgattttcataatgaaaatgtttgaactattacaggaattatcaaaatgtggcacagagacatgaagtgagcatacgccataggaaaaatgtcaccaacagactagctcaatatagagttcccacaatccttcaattttcaaggaaaaaaaaaagaaagaggaaagaaaaaatcccacaataacttcaaagggtaataaggctaagttcattaaaacaagatatgcctatattgtattcataaaactatttttaatatataatagaattatgtaattcataaaactcttgaatgacttgagactccagattaagattccccgtctaatgaaaatgtgtgtttcttgaaatgctactcatttgcaagagtagaagatactgtctttaaaaatttaacaacaatgatcgatatcatagaatatctgactatatatatatccacaggaattttatgaaagaatacaagatagtagaaataaaattcatacaaattttcttactgtgagtgaatcagggagacttctctttccctacaaaatggtgtttgcttttaaaataggtatcttgggaaccgtagctatttcacagaagaaagatctgaaacagtctagtgcttaggtttccagagttggctgcaaaacagctctcttgaaagcttctgatagaatccagagataaagagccaaaggtatcagagaggtctgccaaaagagtctatagaattggaagtatttgtagagaagtgtccctaaggtcactgataaaaactagaggatagtccacggagataagaaactaccaagcataagagaataaaaaatttctgctgagaaataccgagctaatccatcaactttatttttttagtccttttctatttcacttttcttcaataaagtctttgttttgacactgtagaaaggttttcacaaacagttagtaatggaaaaataaaacaatccttaaatttactttctaagacaagtttatgcgctacaaaagaaggtagaaagttgacagtttttactatatttgggctaactataagcaagtagagtttacaaaaccatggtggggatttatgtagttggttcaactaaatggaattctggcttttagtggagaaaaaagtagaggatacattagacaaccaaaatttatttctaggctaagtatggtggttcatgcctataatcccaacactttggaaggccaatgggggcagatggcttgagtccaggagtttgagactattacgtgcaacatggtaaaacccttcctctacaaaaaaatataaaaaattagccaggcatagtagtgtatgcctatagtcccatctactcgggaggctgaggcaggagactcacctgagcctaagagtttgaggctacagtgagccatgatcatgccactgcactccagcctaggtgacagactgtgacctcatctcaaaaaaataaaacacaaaatttatttctctcatccaaaaaatatggcttcatacaatataactcatttaataaaagtttatacattaaaactactttctacttaggatggattatagaattgtgagggaaagaatcaatatttcttgatcactaatgtttaccagatattttacttggtgtaaacaaatgtaccataaaaactaattgctgaagaatgatagaaaagacactttagatgcataagaatcatagaaaagtcactttagatgtttgcccctaatattcttggatcactggacaccacctaccaaaaataaaaacctcagaccattactctgcttaggactccaggaatccccaaagttagaaatttctcataaaaatcctactgtttgatggcctatagatctctgacctaattgtttttttatcatgctattgactcttcagttgcttctattctgtattaattcatctgcagcaatctgctatatgaagagtgtttctgttgttttaacatcactgaactatacttgatctctgacaaccttagagaaattagtcactctgcagccacagctttgagctcgccaccatctttgcccatttctatatctctgggtttacttctctcttcagagcttaggaaaatagattccctttaccatgcttgactagtgtaggaaaacattagaaagcagaagatcttaccacgcagttacacaggtgttacagatcttactatgaagtattctttccaggattcccaaggtgagaatgtcgacaggttcaggaacaaccttatactctatccagaatggctgcttcatgctagcatgcgggccctctgctgagtctagctccctaccccagcgttctttctctttaataggcaaattttctctaaggcagctcattgtcttttcctgtaatccacattttatggcattttattcccaccatcattctgtcagatgtttgtttgtttgttttgagatagagtctcactcttctgcaagatcttggtttgcccaggctggatcttggctcactgcaacctctgcctcctggattcaaacgattctcctgcctcaacctcccgagtaactgagataagaggcatgcctcaccatgcctggctattttttttgtatttttagtagagatggggtttcacgatgttggccaggctggcctcgaactcctgacctcaagtgatccgcctgctttggcctcccaaagtgctgggattacaggcatgagccaccgcacccagccattagatgggttctgagtctctcttttccatatttcatgaggacctgtgactaaatctgggagggttggggttagatacaagcctaaaaattattacacattttataataaggagtttgtgcttgcccagaaaaatatttggtaattcttaggaggcagactaatgacattggccagcttaaccaatttatctcaaactcagggcaacctgttccacagtccctgacacacacatcatttcaccaaagttcttgctataactcagtgttgttctttagaattgtcatcttatgtttaataatttaaaagattgaaatcaaataagaaatggcaaaatttgagcaaataagttagatgtaaatccccaaatacagataccatcattccaaatgtcatccgcatcataacaattaattgactaaaaagaataatacgtgcaatgtttttctttgtaacctcagcacacggactaacactatcaaataaactcagactgagaatcttttttcctgagttaaaatcagcataattttgcttttaattttggaaactcaggagaaaaatgaccttccttattcatcctgactctttatcaaactgttcgatctcttttcaatattttgtggtaggctagtagttatattcatggtctctggaaaccacaatcaaaccttatccaaattccacgtcaactactgactgaatgatttgagatgaagtatttaatatctttaacttcactatcttttttttttttttgagacagagtctcactctgtcacctaggctggagtgcagtggcgcgatcttggctcactgcaacctccacatcccaggtttaaacgattctcctgcctcagcctcctgagtagctgggattacagtcaagcaccaccacactcagctaatttttatatttctagtagagatagggttttgtcaagttggtcaggctggtcttgaactcctggcctcaagtgatctgcccacctcggcctcccaaagtgctgggattataggcgtgagtcactgtgcccagccaagtcttgtttttgaagaaagaagatgatatttatcatcccattactggatatatacccagaggagtataaatcattctactatgaagacacatgcacacatatgtttattgaagcactatttacaatagcaaagacagggaaccgacccaaatgcccatcaatgatacactggataaagaaaatgtggtacatatacatcatggaatactatgcagccataaaaaaggaatgatattatgtcctttgcagggacatggatgaagctggaaaccatcatcctcaggaaattaacacagggaccaagcaccacatgttctccctcataagtgggagttgaacaatgagaatgcatggacatgaggaggggaacatcacacaccagggcctgttggggagtggggattgaggtgaaggaacttagaggatgagtcaataggtgcagtaaaccaccatggcacacatatacctatgtaacagcataacaggtgtatacccctgcacattctgcatgtgtctcccctaacttaaaataaatgtttggggctgggcttggtggctcatgcctgtaatctcaccactttgggaagctgaggcaggttgatcgcaaggtcaggaaatcgagaccatcctggctaatacggtgaaaccctgtctctactaaaaattagcccagcgtggtggtgggcgccttagtcccagctactttggaggctgaggcagcagaatggcgggaacctgggaggcggagcttgcagtgagccgagatcgcaccactgcactccagcctgggcatcagagcgagactgcgtctcaaaaaaaaaaaaaagaaagaaagaaaggagagatgaccagaaatctataaataagagcaaaaaagaaggagagatgggtagtaaaatctgatgagaaatgtttgaaagcagtgatggggaggagagtaaggaacttgaggggtcaaatagatggaataataaatttgcagaaatgaggagcagaaaaggaattgttcactttcaggtttagtttttcaaaaacttcaggtgaaaaccgtgatctcaggtgaaagccaagtatcattggaacaaaaatgcgagggaaagatgaggggagattttttggctaaaaacatgtcactatttaatagcaaatcatgcgatttaaaaatacaatggaagaatttcagaatttggggtgaaagtcaatggggtcaggttaagcaatttaaagatccacgtagatatgtgtttccaggaaatgaagcataacagaatttcgtggtgttttatgatacccgataggcaaaaacaaaggacataatcagatttttcttcatgccttctaaggctgattgtcatggtgacattgtgggaagaagaaagaggcttttgctggaaatacggagaatgtattggttccatctaatctttatcgttttctccatcacaagtgttgaagaagtcaaaagggtgtgcggagttataggatttgcgctatggtaccaacaaattcaaacaataaaatcttgggaagcattcaaccttccatgtaagatagcattccagtttactagcaaatcttaccagagtttattttctatgtggatgaagagcctaataaaagtcccaattagcttggcattcacttctgtgaaattagtaatgcgtatgtacataattagatgttagactagagaaattactggaatcatgtatatgattccattgctaaagatttgttacagagatgaggtttttgcctttatattttatctagcagaaaggttgagtaggtaattattttaaaaaatggatctattcaattaacggattagaatgaaaagctgttaaagaagatagtgatgcaattggtttctaacccactaaatggaaacttgaggaaataaaaaatttttaatcatttaatttatcacataactttctttattttcctataatttaaaagcctcattttccctatatttactttttaaaaattatctactgattaaatcaatctgactcttcctctaaatttcaattattagatgtttatacagtaagcatatccattgtatatttcacatgatcaattaaaaagtctactataaaataaaaggttttgaattaaggaacttttaaaagaggaacattgtacagtagccttggaataaaagtgttatagtatcttaaaattaattaatcgtttgaaacagtccctataaataatataaaaattgatatgttttattaatatccagaaatgaatctcaataaatcatttctaaaacttaatggtaaaagaacaaaaaactgaataacaattattctggctttataaataacggacattttcaagtcactttctatttgcctctgaaaatcgacccacagtgagattttggttggcaatgtggaatcaccaggcagcctctcttatacttccaagacaaaaaatgaggttatttaacaggtaacccctcagcaaatttgatctgcgtgaccactctatttcacctgatttctatttttaataagtgtgtgtttgcctgattagcttgtttatctaataagagaaggtcttaaccacctttaagtaaaaagcatttagaaatagctcaagtgggacatctgaaatgtacaagaaaattaggttcttatcaaaagactaagtgtactaggcatcttctgtgtgctttattatagaagtttgtgttctatgtttgtaaatcagattctctgctagctgtgaaaaaaatttaaaaagaaataaacattttgatatttatactctttaaaacagattttagggagaatttgaagatgatcatgaagattttatttacttaattaactaaatatgctcacttgtggttaacaaaaatataatttatttcatcttgaacaagagatataaacccattaaacttaaaactgctgagaaaaaattccattgttgattttttaagagattgaatgtcttcagcattagacttgattgatatgtgggtaggttgatattgtactaattttccatggctgacatgccatcaactcaataaaatcacacttacaagaattgctgagtcatttgttggtaattcaatcacaatttcaaaagtgattccctgatttagatggggaaaattgtttagaatatgtgtcaatgaattataaagcttctctcctgtatatgcactttagattcaagtgtaactgtttgaactaagagaaaacttttgccccaaaactgatagcttatcggtaaggtttgggggataagctcatgaattgaagagctatttggaaatttttaaacaactctggctcagtttggagcttcttgaacctgtttaacttttgatcacatagaggtcactaatatatatttcttatttttaaaaaatcctccaattctcacataccagattattaaatatcttaaagtttcttagattcttaaatactgtcatttttcaatgaaattactagtaagtacctttactctcattgaattaataaaaacctatcaatgattaatataaaccctaaaaccatgtcattgctaaaaaggttacattttgaacagtaaaagctatatttatccctgcatcttacatagttgattttgagttctacaacgttatgttgcaaaccaatcatgagttgtacctacccatgcgttctaagcttatctcttctatatcccaacttattctttatatactatcaattcaaatttattataatgtccagaatcaatctgatgcaggattttttgctccttctttcagctaatatctgggttcttgtctcatgaccaggaaaaattaggcccacagacaattgaaaggtgaggagaacagaatttattaaaagaaagttctcaggaaaaaagagggggtcttgccagcagactcccacctcacagagtgaatgccaggccaccacatgtgagcagaagatgccaggctcctccccactgcataaggcacaaattcctgtggttccaccccactctcccagtgcacaggtgggcccttagtctgagctgttccacattgatttatttcacttactgtgcatgtgttaagggacagaatttttcaccaagggcatatttaggcaagaccctatgcaggttctcttatctgcctcctgcctctatcattcccctctctaaagaagtacatctaacttctgttagaataaggataaggatgaagactgatcttaactgcttcgtgctgaaagggggcactgtttggggaaaacagctgtcagagctccctcagaggcctaagcaagggtccctggcaaaagaagccattgtctgaggctctggttgcatgactgtttggagttttatggcctgaaggcaagaaaagacaaaccgggtcattaaaaaacatgtatcaaaataaaacaagggggtgcagtggctcacgcgtgtaatcctaacactttgcgagtccgaggcgggcagatcacttgaggtcaggagctcaagaccaccctggccaacatgatgaaaccctgtctctactacaaaaaatacaaaaaattagccagccatggcggcatgcacctgtaatcccagctactcgggaggctgaggcaggagaatcgctgaaacctggaaggaggaggttgcagtgagctgagattgcaccaccgcactccagcctgggtgacagagtgagactctatctctaaaagaaaaaaaattaaacaagatcaaggtaaagactgcttgaaaatcttgagaacttttaccagtttgcacagagagagggagtccaagagcccaactgattaaaaaacacttttaccctttttgccagcaggtcaggcttctgggttcccttaccctgagcccaatcctaagtcaaccagtttaatgtttgggaaattaacttttcccagtttggaggatgcatctgaggggagtgtcccatagtacagagacacaattacctatctgtgaagagagaactgaggaggagaaactaaaaaagaaggctttttttttttttttcaaaggagtctcaggggttcaggatgcatttgaaagtggtacagactgaagatggatggctactcatgtagaaagaggggaatgaggcaactcaggttgccttctcttcctagtgaatacctggggtatgtgagaaagtgaggcacccttctttctttcttctgtccttacatctccgagttctggcaactgtgacaagagtttcacccatgggtgtcaaagcagctttcatccatgttaacaggggagcttaggagatgggaatatctgctcttacccatgtacaccctatctcctctgctgtcagtagccttcgagttccctagatcttatttatgccatggatactagcatgaactttatccatgaaacaggaagcttggctcaatcggcaggaattagtcatactcacctatgttgtacattttaacttctgttatcatctgcctctggatccctcagatgcaagtttttttcctagggctttgatctgaagctaggaattgagtttgagacaaaaatatgtctccaggggttgcatggactccttaacataagccaaatgctgagatgaggctgtggaattgagtcgtgctccaacaagggagagaaaaggatgtcttgtgacatgcccaggtaactggtggctgtagttatgcttgctaagattcgggtgcatggggctttgctttggttagttcccttggtcttactttcccaaaaaagaaacttctgggtgatgggcaccttatttattcccattacctgactggatttgcagaataattgctcagaattaaaatattgatccagagttttacattacttatcccttttgttccttgtgagctgcagccagagatcactggttggctcacagaaattagcagggttagtccaaaatgtagacaataactttaaaacagctaatgagtctagaatttaatgacaaatgtataataagttttgaaacataatttctttctccagtcttcatctttgttaaaaacaaatcatgataggactaagctgtttgcaaaataaactttagtcctatacttggcctgtttatttgcatagagtgtagcaagaataattattttgacataggctttttaaattggctttgatggaacgctgttccacaaggaatctcagataggacttcctgaagctgaaaccacccatgggtttttaccctcgaatacctgtgaattggtaaactccactcttcttgaggtcccaagaacatggggttcctggacctgttagaaagtgacatgctttactcaccacacgttaggaaccctgcatggggactgtgtagacaaggtatgaggccagttttcccaaaggggttttatcagctctgtaagttgagcttggtttcttaaagggaagcatatccttccagtcaaagccttggtaaaacaaccagtttctccaattgcatcctgttgcaaaagaaagtggattcttattgtactgatgcaaacaattatactgccataagttaggaatacttacaactagtttccaaattctgtagatgccaggcagacagagagagacaaacatgctccaaattttgttcataggagtataccttgctcaattattaaatgctgtaaatagctcaaaataaatttccatgactctgaaaaagaaaacaaggatcagcaatgttccaagcaagtgtcagaaagattactgcagttttatattagtttagtctgtttagttaactcttactttgcttgatattcatgaacattccagctcttcctttattccaatgtcacaatctccaaagttatcagaaacttgcatttgagagcacgtgttaaaattctatagctgattataaaccatcttttaaagaggatgaaaataagacaacaattttctgtgaataacaaaatgtctaaaatagttacagtcagaaacatgattgacaaagaaatttgattatctccgtggtttgcaataacttaacgtaacaaccttaattgtgattgacagcatacactcacaccttagaattttagatatcccatacaattttggaacacatattaatattattccctaaaatataacctgaagaagattaaacatcattttggcaatcccatgtacctaaacgtgtcaaataatcctttttacctatcctctaaatgctccatgggccctctgtagcaacaaaagctaggggtcaggaaagataatttttgaaactgaagttcaattttaggaagactcttaaatgttagaggcttaaaacacttgatgttatgaaatagaattccagattaccgtaagttatttatttttccaaaatgttgacttgaaaattttaaaaaagcaaaaaccttttataacccattacaaactttgctaaagagcagattagtgccttaagagagcctttttgtgcttttatttcaatgctcagtttatggaaatggcatgtaatacccttttgaatttagtcaatatgtttgcacacagaatttctttttcaatattaactttcacaattcttctaaaaattgtttgaacttttaactttaccttatctaattcaaaacaaaccttaatcctaggcaaaaattcatattttgatgacatctgcattttatcaataatctttaaggctgtttttagttctcaaagattaaagtcacgtgaactaaaaggtaccagagcttttacctttcctttaaataatattagatccaagaacttatccttctttaagtcaattaattagagcttttttcaaatacacaccatgcacacaacacttatataactaccgagacaggcagaagaagatccagtagctataagattttttatttgccagttggctaattgtactattggcctctgggttgagccctataagagcaaggctaaagaagcatgtggtttctattgcctaataaataggtatagctggaagacaaaaacagattttgagaaggatccatctgcctctaattcctgggggctccatgaggaaaacagaggtctctccaaaaatggaatctgtggtaccttttctgcttttcccaaagagtcccaggccatcagaaattaccatagggcctctgatgtgtgcattaacagtggcaaggcaaaatggttaccaggccaccacacaggagcagaagaggccaggctcctcccctctgcataaggcgcaaattcctggtggctccaacccattctcccagtgtgcaggtgggcccttagtctgagccattcacattgatttatttcccttactgcacatgtgttcagggatggaattttccagtgactgagaaaaaaccttttacaagcaaagcaagatccaagaagagaaaaacataaaggccttttaagtatacctaatatttggatatccacttttaattaagctgagcactctttaagaaaatccttttaaatccgttattacctgactttagccatgccaagcggccaatatttctggcttttgaactttaccaaaagtaacatcccaactgctcatagaaaggaaaattcaaggtggcttgtggcggggaagagaatcaacaaagggcaaagttcacacagatatcaaaccagaaaggactcattctctaagccaggattgaacctgggctgccattgtaaaatggaagaggcaaaaacaaagcactgccctttggttacagtcatgcttccaaggacgcaaaacaagatggaggcctgcagtaaagtttgcccttaagccaacagctccttgagcattttgcgggactggcttgaacaatgggccaatggagtcctatgcctgcattccatcctaaggtaaccctctttctgacagaaccatacagaaagacatgcaaagcacatcaaattgactacagcttaagaccaacctcaaatcctttttcacaattaaaactttgcagagaatataaacagcgataggctcctgacctagtaaagcttgtcacataaaagttaactcctgacctggtggagaaaagaaaaaacaaaaacaagacaacttaaatggagtgctggaaagatgcctgggggaagaacctctattcttatgcaaatgagtttctccaccagggagaggaaactttcattgctgtttcttctctggggcttggactgagctggacccctgcgccaggggaggggaagactccgtgggtaagtggtggggaatgctggccagcttgctgtctggggcccttggaaggggagggggacgagaagccactgctcgcctgtctgtcccgaaaaaaggaagaaaaatgccacagaaaagacagggttggggctgaggcccggtggctgaggcctgtaatcccagcacttagggaggccgaggtgggcaaaagaaaatggattcttattgtactgatgcaaatgactatactgccgtaagttaggaatacttacaactagtttccaaattctgaagacgccaggcagagagagacaaacatgctccaaattttgttcataggagtataccttgctcaattattaaatgatgtaaatagctcaaaataaatttcattgactctgaaaaagaaaataaggatcagcaatgttccaagcaagtgtcaaaaagattacttcagttttatattagcttagtctgtttagttaactcttactttgcttgatatttgtgaacatttcagcgcttcatgagtcctgtacgtttttcctttattccaatgtcacaatctccaaagctgtcagaagcctgcgtttgagagcacgtgtcaaaattatatagctgattataaatcatcttttaaagaggataaaaataagacaacaattttctgtggataacaaaatgtctaaaatagttacagtcagaaacatgattgacaaatttgagtatctccgtggtttacaataacttaacgttaacaacctgctacgagagatcgagaccatcctggctaaaatggtgaaaccccgcctctactaaaaatgcaaaaaattagctgggctttgtggcagggcgcctgtagtcccagctactcgggaggctgaggcagcagaatcgcttgcacccgggagatggaggttgcagtgttaaatatgaattctaaatttctcttcaaagaattaatatgtcagtatgtgcaattttttgccttctacttttaaactttacttcctcgtaaagcaacctttttcgattacctactccaccgtgactcattccgatcacctgatcacctgctccaccataactcattccggttacctgctacctgctccaccctgtctcattattctccaccctgtgtaaccatttttttcccgccaaagcactcacccccgtcgctctctttgaattagccaatcggaattagtttaggctgtgtggtctaaccttagccaataggggaaggacacagcagcaggggtcacatgcatcagggataagaactccttcccctcccttgttcaggtgtgcgcgccccattgctccatctgtgagggctcacccttccatagaagtaccttgccttgctgaaaatcaaaaagaacattttatattaggaggatatctcttttgcagcaccgaaactttatatataacagcagtgagccgagattgcgccactgcactccagcctggcacagagagagaccccatctcaaaaaaaaaaaaaaaaaaaaaaagacaggggtggacagaggccagccttctcagcgccgatttcctcatgtaatactttctcttgtatcctcaggtgggtcactttagcctaaatctcctaagtggtacatattattttgttataattctaattttatgtttaataaaattttattatttacattttttgctatgtagcttatttgtagataattaaattattaaactaagactccatttttatccatatatgaccaaaatatttcctgcacaaagctatatgcataataacaatttatcacttgaatgcataaactaaagtttaccaacaaaaaatcaggtacgacaaatccacatggttatatcattgaaaaaaagcttttctgtagttctaaacaaacattccattgtaacaggaatgcaaatagttgacattgtgggcaaaaacgtttttgtataaaatattttatgttatctttccatgaattttattaatgtattttcctcactatttatattttccaagactttactaaacatagtttctatgttttaaaacaaaaacagtctattttcagttgcaatttttaaaacaaaaaaatatataggcttccaaaaaaaaatcagttagcttttatttcacctctatccttgtggaactgataagaacatagtaattctaatattttatgaaccagaatatttgagaagcaactggtcctccatgtgtaagcagaactccttcagggatattgagctcatccaccaacatgactggaatacaactgataaatcctcatggaaaataaatgtgttgtagtctctgaaatatactaaaagttgtagaagatacagagttagcatcaaagtagtcacaatctatttgggaagccaacatgtactaacctgggacaaaagttttaagtaaaatagaatgcaaaatttgaaacataaagagatataacatcgaaggaaatagtgattgaatagattattgtaccatatatactctctcatagtagacttatacattcccacccactatcgtacaactttttcagacattctgtgggaagaaattatgcacttatctcagtggtttttagctttttatcatgcagtgtgctttgatcaatggaatgtgagtgaatgtgatatttatgtcagaacagacttttaaatatgactgcatggtctgactcagcccttctcttagttctgtatttttccaggacagaataccatgttccagataggggcggcttcattcattccaagaatgggaagacacggggaacagagctgagcggcacagctgccaacttgtcatccttattgtaccatgagtgagacataagtgttgttgtaaaatgctgatattttcagactgttgtaatcgcaggactcatacagaagttaatacaacagtaagagtgctaccatagcacatataaaatcaataggtgtgactgcctttgggctgactgacaggctgtgtgaaaaccctgaacgaagtttagacaaatgacaatccaggtattcaagccaaaatatttgataagactgttgcctatcataaaaatacgtaatggatgtcatgaatttgtgttcctagatttgttactggctgtgtttgctatgataccacaggaaggagacaggtttgtaaaaaagttaagctgtgggcagtcagagatgaaagagacaggaagacaatccacacaattcaggacttgtacatttgaaagatgcactcaactccaatcagtaagaagtaaacttgagaaaagacatgagccacaaaagccaatgaagacaaactctgggacaaacatcagatcaaggcagcagtggtgagaggtcatcaagctccttgctaagatttcccatttacttatgatcaagggaaagagaccagatatgtggtcccaaagaagcctgttaagatcaccatacctatcacaaagtttagacaagagatgtcatatgtctcaaaaagaactgtgggtgtcactattggcataaggagctgactaaaatcaaatagctaaaagccaacaaggttttgcaaggtatatattttcaaaaatgctataagcctagtttaaaagggactataattagaaggcaaaacaatccttaggccctcaatttcctaatggcagaaaacaggcaaagttgctcacctaccatgattgacatatgctccatatgcctttctgatatggccaaggaaggtgaggaaaaaagaagacctctcagagagaagaaataaagttttgagaaacaaggatgggtaatcaacaggcagggactgggactggagtccaatcaggaaacatttcctacattcagagatggcagacttttaattgtcacagggggattaattgcaaagaagcagtgactttgagtatcacttcttcttcctctatttgactgggaatgtttattttagtatccctgtttcacaatcaaatattgggaatagatagagaatacacttatattattatttcatgtttccagatcaaaaagagctgcatctgcgcccgattgagataatgaactacaggacctcacatataatgtcttgattgaaagagccatttgctttattcctagggaagtactgagtgtatttttcatgcagggagaaatcaattatgtgccatcaagagcacagataggggtaattggcattattatttgaatattgattctctcttctttaagagtattacataatagtatctcccagaaagtgaagtatactttactactgcaatttgattaaattactcgtttgggagtgaaataagagtagacctgacatttaacaggacagttcagcaggatctttgggtgcaactatgtaatatatttcaagcatttgccttaagagcaataggtcccagatagtagtcagtcctagattgtgttctggaactagaagatatatggagacaatcagtccagtgaaatccagcctaatccagtagaccgcagttaacccagagttaacctctaacttaccttcagtcaatacatatataaacacatagagtttttttactataacaaaaatgaatgcttccttttacagtaaagaaaaaaataatcaggaacaatttggtagaacaggtgaaacctaagccatattgtgaagaatcgtcatctaaataagaaggaaatgaagcaaaatatatttgaagcaaaaataagagcaattgcaaaggcaagggactaggtataaagttggcctgttagagacaaaatacagaaataattctgattagagagccaaccgcataagggagaacaaaaagaaatagattaaaacactaagtaagttggtaagattcacaatcttggggctttatgaaacgcacagtaatatagcatagccagcctatattatattcatatgtttctagcttctgtagtcttatgacttactgtggtgggatgtgttttcctcttagagtgctcttaattgtcgcagataggatctagaaaaggaagcatatttccactgttttcatgttcatattgcaatttgttagtacctgttcatatctgatttgtcaatgtgaaatcttttaagctttcattgactctgagttcgtgtgcttggaaattggtgtcaatattgatctgaacatagaaaaaacagtaataaagtggcagaaagcaatattaccgttatctccagtgtttaactagatttttacacctcaatttaagtatatattagtttgtgtaactgtagtagtagtatcttatccagtaagagaatagcactgtcagctactgagaaaggctatatttgaactatgtgacctaagacacatagtccagagggaagagaaatcagtgacatttctttccattttaatgtcaccagagccaaagtttggggaacaagagtttatttcaaaatgacaggtgaacattgtagcaatttttccttctccttttctgagaaataactttcagtacagttacattagttaataataatgtaataatacttatagatagtaagtagcctacaatagagaattgtatgttcgtttttatttaacctgtaaactctctatgcctttgaccattgaactcatcttctaaaacatgcaaatttatctattgctacaaaaaggagttttaatatggacagacattaaagtatttgacaatgtggctcatttcaataattcagtgattcattgattcaatttacttatttttttttatctccaactgagtggcatcagttctctagattaagatgttactttacagaaaaatgagctgtttatgttttccttttctgtccaactgtaaatctgagattggcttagcaaactacatttgaaaactaacaatgctactttaagcctcatatagatatttacatatatatgaactaaaaagtaatttttagagtacttatctaggcagtgagtgttaaaaatacactgcattggtttaatgtgcttagtaatagaatttaggattttcattgtgtaatactacaatagacaaaatgcatttagattttcaggagcccccttcaaatgcttgttcctgactcaaaaagagatatttccagagagctagccatgcaactcagaaaattccttcctacatcttcctgatacctgcctactcctcttaccatttatcctgatcctgttccgtggaggaaatatgtgaaattccagtattataatttctatttagtgtttggatgcttatatatctttaaattaataccttattaaaacacatatcagatattttagtaccaacaaagactacccttgaccaaactctgccaagctcctgtaagccctctaggctttaaccttaggatcgatgattattgagcctgcatagctcaactgtagcaagaatcttggctgggtgtggtggctcactcctgtaatcccaacactttaggaggccaaggcaggaagattgcttaagcccagaagttaaataagagcctaggcaacaaaatgagaccctgtcttaaaaacaatataaaaaattagcagggcatggtgacacacaacctatagtctcagttacttgcaaggttgaggtgggagaatcccttgagcccaagatttcaaggctgcagtgaactatgattgtgccactgtattccagtctgggtgacagagcgagaccctatctcaaaaaaaaaaaagcttaggaaacttcatcacccttgatacctgatcactttcagtatatgatcaaagttctcatcccacactacttcctgagcgttttctgatcatcctgccctgccttcagcaaagaatccacctaattggtagagccagagtctccccttaggcataatgtttctgcttataaatatttgatccaccaaccctgacccacttggctatgaatccccactcttcctattatattcagatttgggcccagttctaaaccgaggtcccttttccctatcgcaatagctctgagtaaatctgacttcaccactttgactactgtccagctctgattttctttaacaggactcatcaagtgctatttagaactttcagacattttccttgcttgtaagatatatgccctcctccatataatcttactaaaataaattatttaatgatatttgttagagcaaagtaaggatgactttattcaggaccatcatgataagtatacggaccactgcaacagaatcttgcagtggaggaagaagattgggttcaacttagaatgtagcatgggcaagtgggaatttatagcaaggagcagggtgggggtcagttttactgagaaacttaacagaatttttgctgaagacaggccggggtgattagacattacttaggggagagtggaagatgagaaacttgatcagatatcaaggattagtgttcttgctaaactgacttagctgggttcttgctaaaactggattttacagatgggcctaacataagagtgagaaggctggctgaagtttggccaagcaaagattttatatcaacctgaaatgtcctgtacagccttgtctttgtatctttcgctagatgtattccatgccacacatcgagtggtcctttgggtcttcttttcgttcctggaaattttcacatatcacagagtctccaactgctggaacattacaggttcaccacactttgtctcactaatattgcctcaatctttatttctcaaaacccatgtcactttttctatgaaacttttactcaagtttcagactaatttaggtaaccttattacatacactctcagcaaaaaatatcttggctcagaaaatgataaccctaaatatggtgctttgacatgctaagtactttggaataaagaaaattgaaagacctcagaaataagcctcaggatcaacagctctctctaagcttctcctctctccccatctctctgatttttttttttccatagaagtaggaggggttctctctgaacactaccttatctgactgaggaaacttctttccaaaagaaatgcaattttcttaagacctcttcctatgtatctcatcaaataaccagaaaaggttaaccagtggtgaagagaagaaactggaaattatcatcatgaccagataggcttttcctctatttttctgagggtaattcctagagattacctggaagaatgtatctgcataataagataaccttggttcacaatgtagttctgcccctcacattcctgtaacttgtctgaagctgctatttgtcctttggccccattcagcatccaaagagaaattgtttacaaaccattgtctagtcttttggttcattcatttacaatctccccactttcctcacctcaatgaaaagggtatttaagtgtcaattatctggtccttccctgagtttgcaacttttttatatggccatcatgtttatacacgttaataaatttgttatgcttttctgttgttaacctgacttttgttagagaagcattggctgtgacccttataatgaagagacaagggatcattctctttctgagcatagacagtacatcttcctaatgtttatattttaatcgtaattaatttgtttatttatgtttaacaatataataaagcatagtatgcttgtcaatttcttcctattttttaatatctgggaagaattgcaggcatcattaattcatctggaagtagttacctaagttgaagaaaaggtttctggctgaaatggaaaggttgctaaattttagaattacaaaatcaaacatgactcaggagaacgtctagcacataggcaaaaaacatgtgactaactctgccaagtatttttggaattaagtaaatgccttatttcatttaagagtgatattttcattgaatgcaaactctttactagcccactctaattgcctatcttggaatatatgataattgcaatgcataggtcaaataaacttcctaacctgttcttgagcaatttcagtaagcttcctgcaagttaagtgaaagtatcaaataaaaaattgtactacccttttttttctaattggaacatagtttttattaccactttgagcattgctatttcatctgtgatcttgaagtaactactgcttgatgactctgataaaggataaaggtcatggctaactttgtattagcatcttgcttttgtctagtaacagcgtgaccccttgctctctggcatgtttaaagaaaagaagagatctgtggtatttatgatgattgagaaactgtaacaatgcctgggtagggggttaattaggaatgaaaatggcttgacatctctccaaaacatctcttctgggaggtcattttcagaggaatgcagacttatgcatctctgaagtgctttataaaaagcatattcttttagaaaatgaagaaccagtcaagaactagaaaggatgcataatgagtgaaaagtaatttgaaaagtacattaagaaatctagtaattcctgtctgttaaatcaggcaatttgcatgtattttactgcagatatgaaaaaataatactaatttatggaagatatgttgtaattgattgtttcagtcatttttctcagtttgcactaaatgagagacactattttgtttgtatttatgattaaattgtgttcagagcaatgaaagataattacaaattgtctaccacagagtcagttaattttatcctattcacatcacaaaatatagacacagcattgttgtgactactaaagaaagtttgtttattcactgattgtcaagtgagtatagggtatgttaaccacaagagaaaattaaaataaaatataaatttacaaaaaaatactttctaccttataggatcttacagtctactagagggtatatgatagtttcaaaaattaatataagatagtagttgtttatttccagcagttgatgctaaaaataccatcaaaataaccagcgtataaatcaaattcaaattgactccttctgcaataggggaaaccactaccttgaccatcttagtaaagttgcagatgggacacatcaatggtagtatattcaaaagatatggaagatctcatttaagatgagtcttttctaaggacagacacaatttaaaagtaagaggcataatcttccatgttgaaaataaggaaagaaatttcccttccctccttttactttgagtattttgtttataaaacatgtaattttaagtaattacttccctctttgaaatgtatatatatatcattttgaagaccagattggcattttgtcagctttgtgatctaggtttgtatttctaaaggaccaagaaccgtctctttgaaaggtagcaccaccttctcccagcttctgtggaaagttaggagaatatctttagtgggcaccttgttccaagttgcaaaactacctcttgtcatgaagatatgaaaagtttgtttcttcttatctaaaggtcaccccaattatcaagtaaagtcaagaagaactctgtgtgacaaatcatgctgtcaagttctctgatttcagaactagttattgtttatcttgaaacatgtagaaacgttctctgacttacaacagttcaactgacaattttttgactttactatgtgtatattaatggtgaatactcatacaaacattctgtttttcactttcactgcagtatttaataaattgcatgagatatgcaacactttattataaagttggctttgtcataaaatgttttgtctgtagcctaatgtatgttttatgagcatgtttaaggtaggttaggctaggctatgattcagtaggtagctagtcagacataagtgtggcaggagaggtccccccaaacaccaaacaggaatgtcaaatgaccatcaggtgatggtcaggtggttgttacatgatctcactaacataataattggtcacagctggaaccagggaaaggcagtctcccaaaagatagaaacacctaaaactagtaatcagcagctttctgatgagatatcaggagctgggtgagtgggctcaaacatgtgcactaagaagcaacatggcggcatttaactggtatatggccttcttctacttgactagtaagggaagaatgccgcaagtgagcatgcgtccaactccagttaatatactgcacatgcggctcctcccaagtgctggaaggccactacgtatacagattaccaatgtacaagaccccaagtcaaaggtcaaactgcactcgatctctcaattgtccacttggccctcttccaagtgtactttacttcctttcattcctgctctaaagctttttaataaactttcactcctgctctaaaacttgcctacatctttcactctgcccgtgcccctcagtggaattcttccttctgaggatacaagaattgagattgctgcagacccatacagattcaccactgctaacaggttagctgtattaagtgcattttcgacttataatgtttccaacatatgatgaattattggaacgtaaccccattagaagtcaaggagtatgtgtatataatgatatgtgtgttcttgactatataaaagggtgagatttctttttgtctttgaaatcttttaatggattgtctgtaatgcacatcacattcttgttcaatgcttattcaataataaaagttgtgtctttccctactacctttgaagaaaggaattctggctgggcacggtggctcatgcctgtaatcccagcactttgggaggccaaggcgggccgatcataaggtcaggagatcgagaccatcctggctaacacggtgaaaccctgtctctactaaaaatacaaaaaattagctgggtgtggtggcaggtgcctgtagtcccagctactcgggaggctgaggcaggagaatggcattaacccaggaggtggagcttgcagtgagctgagattgcaccactgcactgcagcctgggtgacagagcaagactctgtccaaaaaaaaaaaaaagaagaaagaaattctaagttgagagatgattttgttttacttatatttccccagagtttccaacgcacagggcctgtttggaactgggcaaagtttgttatatgacattttagaattcataggcacaatgaaagaacagctctaagtaaatttggaactgtaaagatttgtttattcagctgatttgaggatatgttgttctgaggaggtaaagtagacttgtctattgttcagataaatggacagtcaggaagtttttaagcaaatcataaagttattacagtgctggctcagaaaacaatactcacaagtgtgacactttgacatgctgagctaaacaagcagtttcgaggtctctctctgaccttcccctacctccctgtctctctgatcttctttatggaagcagcaagataaacccttcttggaatttctttaagaaaacttctttccaaaaaaaatgctattgccttaacatcacctctctagggatctcatcaaataactaggaaagattacccacagaagaagagaagactaggagttttcaccattcccagacatatttgtatctattcttcttggagcatctcactgacagattacctgggaggctttatctgcataataagaaaacctttgttcccagtgaagtttagcccctcacctacctgccacctccttcagtgctgagaaatattttgtctcatgtcattgttctttgggcttattcatttcccctgaaaatcattgatgcctacatgcctcacctatctcctcttgccctatgaaggagagtgcaaaagcatctggagctcactgggttattgaataaccattcttctgtgattttctcatgctctgcatagtaaatcaatctgtattccctttctcttataaatctctgtctgtcgtcagttcattttcagtgaaccttcagagggcaaaggggaagctttcccttggcccctgcaacatcttcatcttcctgggttaaaaacttttggacaattaaattcttgtcaattgcaggcagtagagtagtaaattcatgttagtttagacagcaaacagtgtctgtgtgtaatggttttagtcctcttgtgtgaaattgtcatttgaatgatggaagccagatgttgctggtgttcagggtaaagagacattgtgagatagagcaaggacccccttttgaggaacctgaagcccccaaagcatggaaataaaagaaaatcctgagttccttaaggataacttcaggtaccaagctagccccagaactaaataagtaacttgttaaacaagaaggtaatagtagcttaaaacaatagccaaggaagttagagttctggagatacttgctttcctcatagaaacgaaggatagcatcttaacatatgtccctgacttgtctttcagaaacttggacccccaatgaggaccttcaccaaagggattcacgggcacagataagggcgaagtgaagatgaactttaactattgtctttttctctaaatttcttcctgagggaattggagaaatcactcctcacccccaggcagttaatgtttttctactgaccccaaatttttaaacaaaacttctcttccttaactaattgcaaatcagcaaatcttagaatctgtctacgacctgtaagcaccaccatccctgcttcaagatatcctgcccttttaggcctaaaccagtgtgtaatctccatgtactgatttactattttgcctgtagcttctgctttcctaaaacttataactgcctttaaaaacacttgcctgcaagccattgggaaggttaggatttgagcacttagctgcctggtcctccttgctgggttccttgcaataaatgcctttccttcttttgctgcaaaactccatacagatacctggttttactgtgctaagcaagtggacccccgttatgttctataatataacaattgtatttcagttatgctgtgataagtatgttcacaaattattggaatgcatgactgttcttgaagactagagagaatttcaataggaaggaatgagtaggaaggatgtccctgctagaaatggctatttggatgactaataaaactatatggaatgaaaaggaggtaaatctgaatatgcaactccacaaaaaaaatagccagaaattaggctggaaataagagagagaacctgatgttgacctaagaatgttggcctttacttggtagaaatcaggggaaaatttaaatcaaatgttgactcaataaagacatgtcagtttaataaaatcagtaaataaaccagctaggatgttcttaaaagctggatatattttattggttttaattatccaatattaaaagatgtctatagtagggggtttaagggttagatatttcagcttctcaacaattccaggattctggggcagcttcatactattctcctgttcacaggacagctatcctgtagacctggcatactatactcataaaattaagtcaaatccaatatttaagaatgtggatctctgtctgcttctctctctctgcctttgttgttgttgttgttaatcaggaatgtaaatcttttcagaaatcttccagaacactgaactttaggtcgtaagatggacaggattaggacacatgcctatgtccttgtaaggaaaggagtatgaaagtaaaaggaaagaaaaaggaatgaggaaaaaaaattatccttttcagaaatcaaattatattctacaaagatagaataatgttaagaagttttattttaccttcagaaatgttattgaattgatagtgatacagtcatgataagatagaaacaaatgataatgattaaataaaatatcagagaggttgtgataattgtttaattaggaaacaattaaggtatgctctaatctcatatcttattattgcacagattccagagagattagcataattaattgaataacctgaagccataaaatagattcaaatgaatatatttttgatgttgagatcagaatatgtctaatgataaaagtgaaatcacaaatgaaaagagagatcacaaatgaaaatatatatatctatatatatatatggtttaatgacatgataaaaagatttaaaagaaaaatgctccaaaaatatttgccatttatttcatgagtgattgtatattattgctaaagtcaaagagctttacagaataatttgtttttaaaaacccacataattttcccataaaggggcaaagagcagagacatgtaaaccaaaaccacaatgagataccacctcacaccagtcagaatggccattattagaaagtcaaaaaataacagatgctggtgaggttgtggagaaaaatgaatgattttaaactgtttgtaggagtgtgaattagctcaaccattgtggaagacagtgtggcgattccgcaaatatctagaggcagaaataccattcaatccagcaatcccattactggatatatacccaaaggaatataaataattctattataaagacacctgcacatgtacgttcattgcagcactattcacaatagcaaaggcatggaatcaaccaaaaagcccatcaatgatagaaaggataaagaaaatgtggtacaaatacaccatggaatactatgcagccataaaagggaatgagatcatgtcctttgcagggacacggatgcagttgggcgccattatccttagcacactaatgcaggaacagaaaaccaaataccatgtgtcctcacctataagtgggcactgaatgatgagaacacatggacacatggggagagcaacacactccagggcctgtcagaggtcagggagtggaaggagggagagcatcaggaagaatagctaatggatgctgggcttaatacctaggtgatgggatgacctgtgcagtaaacccccatggcacatgtttacccatgtaacaaacctgcacattctgcacatgtacccctgaacttaaaagttggaaattaaaaaagaaaataaattaaaagaataaagaatatttgtacctctatttttattttgacaactttacaatacatagtactgcaaatgaaaaaaatatgtgtaaagaataaattatgaaagaaaaactactaaaaccaaaaattacaaatttgaacatgattatattttctatcatattgtaaaaggagaataaacatgaatatataaggggtgttaaggatgttaaaaattggtccttcatatttagcatgttgaaaccaattacaactatcactgtaatctcagcacttgggaggccaaggcaggaaaatagctcgaggccaagagtttgagaccaacctgggcaacacagtgagaccctgtctttacaaaaaatttaataattaccctagtgtggtggcacacacctgtagtcctagctactcaggagtctgaggtaggaggaccacttgagcccaggagtctgaagctgtagtgtgctatgatcacaccactgcactccagcctgagtgacagacaggttgtctcaaaaatctaggaaaaattttttttaaatttgttaaaaaggtagcactacctcaactagtttctggaacatgtttcagtaacacatatattaaaatattaaaatatgcttttgacttattaatacggtggtcaaaatactactctacatgctttgtaaatattaacctgtataatcttacaagtctataaactagttatttttgtttctcttctacagatgagaaaactgggttactgaggggttaagtaaatgaactctgggctcacagttgatatgtattagagccagatttcaacaccatggtgtctgtctcaagagctcacatgcagtttgcctctctacctttaataatctcacttacagaaatatttagaggcattatgaagatgtatgtagaaggtatttgcataaggaatttttaatgcagctaaaactttgatatggagtaagttccaaacacaggagaattttgtttaaaatgtttacactcatcataattgccagtggtaatcttatgcttccagctggtgattaatcccatcagcactttctgtatcttaagtaaatgacaaaatccatgttccaaaaacatctgatctgtagtcttttttagcaagagtttggcaaattcttggcagtatcagcaaaagtgtgaatctttggacagaggaggtaggctataggaagaaggaagtgttcaaattgtatgattgcttggtagacatctccctttcagtcttcatccttatctcttcttaccagccaaaagatttcattgcaaaattctctttctttctctctctctctctttctttctttcgttcgttcgttcattttttagatggagtctcactctgtcacgcaggctggagtgcagtggcgcgatctctgttcactgcaaccccacctcccaggttcaagtgattctcctgcctcagcttcctaagtagctgggactagaggtgcatgccaccatgcccggctaatttctgtatttttagtacagatgggatttcaccatgttggccagcatggtctctatctcttgacctcatgattcaccagcctcggcctcccaaagtgctgggattacagctgtgagccaccacacccggccacaaagttctatttctgcattgtcttctattcagaaaagattttgtcactttcaaatagggatcatagattcagtctgtttctctgcctagtctctcttttaccctaacctctctttcggagatagaccaaaagatagatagaccgacaatgagagagaatgagtgatagtccagaatagagaaggagagcaggagaacatgggagagagagcgaggcaattttttcttatgtgctctaacttgatccctctgttttatggactttctgtgtatgctctgctgtctaaagtttaggaaaaaaactttaccatgctcagcttaagttaaacatgtttaatctcttaatctatgtcaagtggtagaactgataaccccaagagattaaccgtcatctccacttttccagctcctggaatactatatatcctgaatcacctaagacaggggtcccaaatccctaggccatggaccacacagcaggaggtgagctgcgagtattactgcctgaactctgtctcctgtccgatcagtggcagcattagattctcacaggagtgcgaatcctattgtgaactgtacatgcgaggaatctggattgtgtgctccttatgctaatcttttaataatgtctgatgatctaaggtggaagagtttcatcctgaaaccatccccaccctcctaatcgaagcaaaaatctgaacaaattttatgaacagatgggaacactgtcttttgcagaagatggggattataaaagacacatcatcatgaattgatcccctcacatgtggagagtgaaaatattaataagaaactgtaggagaaaacatgaaagagagagagaaaaaaattcagagaagtaaccatagataccaaaacaaaaacaaaaactcctctgtaatgaataaaatgtcttggcaaaaatatagacattgcccctttcctggactactctccgtcttatgcccagagtataacagctgcaaagaagtaaaataaatattatgtttgaaatgcagatgaagtttaacaaaggggcatttaatggatgcagagaattttaaaatgtttgattccctattaacttgttgggtgatctcatttacaaagagaggatttgtgttatttttgaagaatttagaatgtcacagaatttaaagttgtaagcttgttacattagaatgatggtcattgatatcaaggtttaagagtcttctgtttgggagacttccaagaaaacatttactatatagtgggttaaattacagagccatacgaagaaaattctaagtttttgaaacattagtaagaagattttaagcaaaacctcaaagcctaactttgcgtgcctttgtttttgttaactatgtgggattctaaattacattaagattatctcctcgatcccagtaggaaaatgcaaggttttgattggtatttgtcaagatgatacttaatgtttatattgcatgtcttattttaaaaatatgcagcatgatgtattaggtttgtaggagaaagcggtataaaatgcataagccatatataatctatctgatatggtttggctgtgccctcacccaaatctcatcataaattgtaattcccacaattcccacttgttgtgggaagaacctggtgggaggtcattgaatcatgggggcaggtctttcccatgctattctggtgatagtgaatatgtctcataagatttgatggttttaaaaaggggagattccctcacaagctctctcatcttgtctgctgccatgtgagatgtgcctttcatcttccgtcatgattatgaggtctccgcagccatgtggaactgtggaactacggaaatttaagtcaaaattgtaaggagggatttagaagttttttaaaaaatgcaaaaattgtggttttaaaattaaataattgggaggtaaatttgtttacggagccagatatcatgtatatacaacttgtatttgaaaaaatgaattacggaattatagaataattagtgtgcagcattttggagaatgcgttattagagcttttctcatcatccctaggtggaaaagagccttatctccaggtggctgataatctccaccaagacaagcctagtaatagaatattcactttttgtaatactttggaaaccttcattttttaatattttaatgaattccaatgcccttcaattaaaaataattgaattaaagctatccatccccagtgtgaaaatacgatgagaaattcaaatgccacttcatcaacagaactttaaacacaggtttaaaaatacaacattcagctagcagaaaaattcctcaatgtattactttttgactgcgatattaccctttgttcttctgaagaacttattttttctttttttttgcaactgtatctgaattacctttcagatgattgccatattgtctgtgatttcccttatatttaaacactttacaaatatgtgttttacgttatgaactcaatctccatgttttcaaaatctacatttttgcttttcaaatctgtattattatctttattaagtttgtcaacttgtgaatacagaactttttccccaaagggatccttaaagtcctggaagtgtgtgtattgtgtgctgcaaaggcgaatttacatcaatgtattaaagagaaactataaaattgatccattaagaattaaagttggagccgggcgtggtcgcggccacctgtagtcccagctacgcgggaggctgaggcaggagaatggtgtgaacccgggaggcagagcttgcagtgagccgagatcgcgccactgcactccagcctgggcaacagagctagactctgtctcaaaaaaaaaaaaaaaaaaaaagaagaagaattaaagttggaaagcccccagtttatggacggtagtaaattcccctaatttcttcttgtatacatatcttaaatgttgggaacagggaggtaggagggagaatcttgctaaaactataaaaagaaaaaagagaaaatttatggatttattgttaaattaatggtcttttaagagtatttaatattatagaagacagtagttgtatttaagctttaaaaagagcataaaatctgtgtatatttcccatttaataaaatttaatgtatattcacacatgaacactatgcatttggtaatgttctattactaaaatcctatggatagaaacaagttcattaactgatttggtttggctcaggagcccagttgcagggtaacagaaacacataaatgaacaattagctaaatcaatgacgtttaaacatctgttttaaaaactaggcttgggtaataaagccataagtaattcttattatttttaaataaaaatgcttactcagttgaatttctgcccttcctctagcacttctctaagatgggttttgggatatcattgagagccttgtacaaccgtcaacactgtgagccctacctcctctttgattttctgagcagttgtgtgctactaaatgattcaaaattgtctctctgaaaaacaggcaaacaaataaaaatctgacttgtcgcatttgccagtttccatggtgtaaatactcttatgatcacttctaaaacttccaatatgcaattgttgagaagagatgtgcaccgttggccccaggaagccagcgggaacctctgtcatacttcactgcttctcaggcacagtctgctccaagaatacctctcccatttctggcagtttttggaggtggtttaatgtatgacctgttctttctaggcttgctcaggactgctatattggaccttaccttgtgccctgtcaaagctctagaatagaggttagaaactttttcttaaaggtctagagagtaattaattttagacttgcaggcaaatggcttctgttgcaaaaaaaattaactccgcccttgaagctcaaaggcagctgcataaaatgatggatgtggctgcatcccggtaaatttcatttataaaaacaggccctgcagctcttaactgtcccttgctcacaaactcctgaatttctgctacagccttcgaccagctctgaaccgcaagctgttgacaccacggcttctgtgcaggactagcatgaaaagttatctcttccctgtattcgactgcactgtatagtcaaaaccactctgctttcttcctcagctcgaattatcaaacaccaaaccaagagcagaaataaaaattttggccacttaccttctgtctgttttcttgtattttcttttctcttgatccatgccagaaagaaaaggcagtattattcctgctatgtcatgttatccttctactaaagaacaaaaatcacacagtccagctggcataggcatcatgccagggtgcaattctctgctctgaatccttcaaacttgttcttcaggagcttgaaatatctttttgtctaaacccgaatttcaaaatcactgccttgctaaagggatcaaatactccacctgcttggagatggtatcctcatgattcagctttcaatgggagatgattgaaaagggaaattaaaattcatttaaatacttcctatgatatatgcatattaatattagaaaaacatcaaaataacaacagtgcttatatttttctggtgtaagtaacttttaaaaattacacaagtaatcacacaaataactgcaaattattttaaaatcagaataattaaaatcttaaaatagttgaaattgagaagactatgagaagcctatacaaaatattctacaagttattccacattattttcatgataattaagtggaaatttaggtagtagactaattagcaaattaaaaaaagaaaatatggttatagcaaaatgaaatagattctcatgccaaagcttgcctgagagttttagccacagacaagggggaatatctgtgtaatagggatgttgcagatggtccgatttccctgaacctaaactaatcactgctcctgctttggtctaagagaaaaaaagcatcccttcaaaagcatgagaatgtgtgttacataaaccactagttctttctaattcttttgctcagtcctatcatttaaagcctgaatagattagaaatactctatttaaatttttacatttaaacagtagtcaaatgtatttcactattgtatgaagcttgatatttacatgcgaattgagtttcatgagatatcaaagaataacgatgtagaagataatctgttacatactcttttgaagtatattttttatgaaaaaatctcttgcatttggctttgtttgtctgtgttttatttcagggtcattatattttatccacatggaacatattctagaacacattttcctttaactttataagagacagataagtattatatgcatcactgatatctgaacatgattaagaaaattaaattgcccgggcctaaataattctttaaaagtgtcccattagaaaaatcagaacatgtcacattgtaattattatcttttataaaacatcactatatttagaaaaataagtacattatggtgaaatagcaaggaaaaacctacactaataaaatatatgcataccgatgatatttctaactgaatatttttaaatcacatttattaaaggcaagttcggataagtactactaatatttttatttcaaagagtattcttcaactgatgatatttttaagtctagagatactgtggcatttttttgaaatatcagtatcaatgagtatatgtcacaacttactagcatcaaattaactgaaagaaaaaacctagataaatagaaatttaaaaattcaaagatttttaactcatctatgcacattttctcaatttataatttgggaaactcaggcacctatgttccctgaactcacaagtactagcaaaaatagatatagcacatgagtttagattctttacatgagggtattggggtatagaaaaaaaaggcctatgaaagaagaggtaaaattatagccagtagcattttattgtcattgttcaaagataaagagctaggggctgcaatgcagctctttattttcttggcatgcttgattttgagattttaatttatctaaactgaagagaaaccactggctcaggggaaaccaagtttgtcatttgattgcttgtgtgcttgcttgcttgttttcctaagactaatacctgggagaaatatctccagggagcacctaatgatgtagagatatttgtccccaagggtgttccttcaaaacactcaagtgggtgctgtttactattttatatcacttttcctcagtgaaagacaattttccaaatggccaatcacttctcagcattctaattgtttaatctgattgaagaataaaattgagactagcttgagaagtgatcatttgatcaaggccagtcacacaatctttacaagactctaactcagatctctggaatcataggtaataatatcaccagtactgaattttagatgtaattgagaatttcctgaactactgtgtaggttcaatcttattttgctttcattttcctttattcctatatttatcaggatagtctctggtaattttaattttttactttagaaggtttattctttgttattcttcaaaagctccttatagatttcccatgtgtcaagtaagtagatatatgctatctaaaaaataaattgactgaatattcagttcaatcaaacaactgcatgtcgacagattgaaaggaatacatttgctaagaataaatgtacaagtttcttgcattaccagtcttgagaccaaggttacccacagctcaagtacttctttgctataattttacaacctcactttatcatggttttgagtagagacaatttcttctttaaccctttattatttatggtagttacaaataatgtataacatagtacatgtgctatgtttaatggattttgagtgaataaatgatacatataatttcataaataataagtttatatgattacataaattataaaagtcttaaatcaatcaccgtgttttactctgtctataatttggtccattaattaattaattattaagatgccattcatataaaatttcagtaatgggagtaagtcttcttattggtgtcttttaacaatgaagatgattttgggtatgaagttatggaagaaataacagttgtataaaatagtaaggagatttatttattcaagtaacaagaatatatttttggaggctgaggcgggaggatggcttgaagccaggaactggataccagcctgggcaagaaagtgagatccccacctctacaaaaagaaaaaaaaaaaaagaaggtaacaagaagaatgatcctgggaaggatgacttttctattggttaattcatgggcccagtgatatcattaattacctgactccatttcacctttctgctctatcattcctagtgtttttccagtgtgcctcatggatgtaagagggctgcagcggctccacacaacacatactcacattctagtatgtagaatggcatgaactgtctaatccctaatgactggaacggaaccacccatcatgattctcctctggacctggggctagttattggctgtagcgaaggattgtagggttaaatactgttagctgggagcataactaagagtctgctgcatatctgcattgtactgagttagaaagttattttaattttcacagattgcggcacaatgagtgatcactgcttgatgaggaatgatgaaggcggcattcaataaatgatttgaggaaggtgcagagaccaaaagttctgtattgtttccattccaacaggctgagaaaagccatgttattatgtgaagtcacagtattaataccaatttttcaaggtgagacttatgaaattagcaagaaatgggacatttgacaatatataatatgaaatgatgatccgttggcctgaataagaaaagatgagttagaacgctacaaagaatctttctgttcactgatgggacaattatcaaatgcatgaatacccctttcctacccattaatttaaatcctctttaaggccaggcacagtggctcatgactgtaatctcagcactttgggaggctgaggccagcagatcatttgaggtcaggagttcgagaccagcctagccaacgtggtgaaaccccatctctaccaaaaaatacaaaaacgtacctgggcatggtggcgcatgcctgtagtcccagctactcaggatgctgaggtgggagaatcgattgaacctgggaggcagaggttgagccaagatcttgccaccacactctagactgagcaacagagtgagaccctatctcaaaataaatagatagataaataaataaataatgtttaatgtaatgtaaatcactttatttcacatgggttcatgcaaattttaatacatctttaaaaaatcagattatgtatatatataaaatttgcttatagtccacatacatttgggtcagtcctgcccagaaatatgaaaattgcactgcatgatcaataaaatcatatgatctggaatctgctttctaatttccacttcatactccactgctgtgagattctagacaaattaacctctttgtatttcatttttcctgtcttcaaaatggagatataatagtacttacgtcattggaatagtgcaaaaactaataattcacatagagtgcttagtaattattggctattattactctttctactagcctggtgcactgattagtatgattaatagcagtagtgatgtggatgggaggttggaacttgaagagttgatcagggaaaatttcctagaggcagaaaagtttgaggaaattttaagaacacattctttacagtttaatatgagactgccactttgccaaactcttttgtaaaattcctctgttgcctaaaagttgagtaaagtctggtaaacacacagccttgggtccagatccctgagcagagttggcttgtgggaagtgacactatggagaagttgacttctggggaatgatatcatttagaaaatggactgtaggtgcagaagaaaaaaaaaatccagaagacagataaagaagcgcaggtatgaatttagaggttgaggtcaggagaaatatatgcagatgatccttcatccatataaccagggacttctaggggaatgggaaacaaagtattccctccacccccaccatttatggagagctgatttaagcaaattttacttaaataataaaggaaaaggtgacacaagcaagcaacctggagaacttgggaacatacagcaagttggcatattggttacatattgaattatcttctgtattgtcagagtgaacaagccagcttaaagcaactctccacttgtaaaacaaatgaaacacatatttgctattctgtgataaaacattttgataatgttgaaggttgagtcatgagctcagttaagctttttaaatagttcagtctgatacttatgacgtttgtttcattagcattaatttgcttctgcaataaaacctccctgaacattattttgttgctactatatatcatgaggcacctctgtgggtgcaaagtgtaagcatttcaaggttttggaatggctaatctctaaaccagcatatcattagagaacctacaagttacaacttttgaccctgcttgaatttgttgtattactagcaacagatatacacttttcagtggcccactcactgtccacagtctactatctgcatttacaggtctagttcctcaatatgcgaccctgaccttgtgaaatggcccttctattcctctgcatttcttcactcttcatatttaaaggctacttccaaaccctatttgtcagatagttatttctgattatatctgtgcactcattcatttatcaacacataccacttattttctaatatgctaatgcaggggtggccaacccctgggctgccacctggtaccggtctgtggcctgttaggaactgggctaacaagtgagcataaccacctgagctctgccgcctgtcagatcagcagcaacattagattctcgtaggagcatgaaccctattgtgaattgcacatgtgagggatctaggttgcacactccttatgagaatctaatgtctgatgatctgaggtggaacagtttcaacctgaaaccgtcctcacctgttcctcctgccacacgcaccatccatggaaaaattgtcttccatgaaaccggtcaatggtgctaaaaggattgggaactgcttcactaatagcgctcattaaacgaatattttctaatattttaatagtgctgacttgtgtcattgttatttttctctgcacctgaaagtgttgtgttccttagcagattatgacttcagaagggttaaggtccttttattagattcctttgcttagcacagtattcaacatataacactaatgatggaagcctgatttcgtatcttccagtaaattatattgtttataataagaatggggaaaagctctagcagggtcactggtgatagttcattaatatggaatttaaatcaaatttttagaaattaaaaaataaaatatagatgggaatttatgatacagcacagttatattttagaattaactataagttctttaataataaaaaatgcataaacattctccaggcatttcatagatgagataatgaatgtcttgtcatgttaattaacaaataagctaataagatgctgatgaacaaatattcatcaattggaatagagattggtaaaaatattgatggtcacttaactgggaaaaaatgcacagttttgatctggaatctgagactgtttgcaatggagcatctacaagatgtgtcaaatgtgaatatcagtaacatgttttgttttgaaaaaaagaaaatgttttctatatttgcagacttttcctatgatggcaaaaggatgtcagaagtacagcaagcagcaaatttatttgaacatgtcttattcagtatataaataatactataacaatatgtgaacaagaaatatctctgaaagagacatgctgtggtgagagtattttgaaaccagaatttagaatttctttactatgtgaattttattgtttaaaattttatgtgtataaggatatcacattaaaattctcatttgtgaagagtaagtacttaaaaatcatattttacagcctgttgagcattttaatatttgaagggcttcagtgtgtttttcatttattcatgaaacaaagaatgatacatatgaagtgttaaaatagccgatacaataagctattaagaataacttgtgaatatttaaaaagatagaaatttcatagttatattgcaactaaagcctttgttacatttttactattttagaaatctaactgaatcaaaattggttttcaagaatttgacattttctttcacgtatccatctttgataatgatggcctaattaaccaggccccactgtccttagaaaataacagaaatagattgtctgaattacatggtcttgattcaaagaaactatttggtaaatttaagaaataaagatgcaatgccttggccatataagaggaattctttaaaagtgtctcaaatgatacataaacatatcatcaacccctgcaaatgcctacatgacatcacaaacaattcagtcattacatttgttcatgactctatatgtttggggctatgttaataccatgaaatcataaatagtaaaatcataaaatcttgatgaaaagaaaaatcagaaaaatgtacagctgatcacagattgaatattcatattggcaaaattgagagttgaacaatataggatgctctaacttaaataatatcaatttgttatttaattactaaattaaaacttttaaatatatttcaataaaaagtatcctatttagtatgctttgggctgcaaataacagaaaactcaaatcatgtcttaatgatatggtttattctcagaacaagaaatattaatacaaggacagggtatagtttgcttctgtggtgtacatagttctgagcaaatatttttggcagagaccttgtccgtatgaacaatctgattttaaaaaaataagtcttaaaatatcatggtccatatgaggtgtggtgatttatggatgactgtgtatcctgatagagaagaggtccataggtatttgtttattgtaccaacaatgcacttgaagatttgtcgtaatgtccaggcactatctcttcttatgcaggtccataaatcatttcatcacatagttcatcaattatgctgttcctggctatattattttctattgctgtataacaaactgttgcaaacttatcagcttaaaacaacataagtttatatctctgtttccaaaggtcagaattgcagacacattatgacttcgttctctgctgaagctgtggctgggctgaaagtaaggtgttggctgagactatggctctcatctggggctaggggtcctcttccagctcacagtataatcgcagaatttatgttcttgcagttacaggactgagctcccgttttactgacaaatgttaggtatagatggccctacgccactagaagccacttggagttcagtaccatgtgacttccatagacaggtcacagcatggatatctgcttttttccaaggcaaccaggtacatctcccttacttcctcttctgcacccagccagagaaaacactcaacataaagggctcaccagtttatgtcaggcccaccaataacaatctcccttttgctatgtaatgtaacataattgtaggaataataatatctcctgtgttcacaggctccactcacactcaaagaggaggggatattttaagggcaagagtcactggggttcattttagaattctgctcaccacactgcctgactttatatccaccacaatgagaaaaaggtagtgataatatgtgaccactctgtagaagtgatttgtactaaaacagtagcgatcttatcgcctctacagttccttaaaagcatatttttaaatgtttgacttcatcattttgcacggcgctgcatcaagcattgtgccacccacgaacactggcctctagtgactccttcagaggttgctattgtgctttgttgatgatggccacaaataaaagtctcaccaagattatgcagaaaaatgtgaatgatagtacagttttagatcatgttaaatataatgttctgtattttatagcagtaaatctcaacgacacatttgtcatctgtattttctcttgaactctttaggtcacaatcattctatttctagaatttggtctttctcaatgttggccacatatctgtctaccactaccagcggagaggctaaagaaagaatgtatgacgcttatctatatctgtcacatgttggggcttttttgtgttacggcaatgatctcaaaaactcagaggacataggtgcagccacccttggagaactggtagatatgtcatcaggagcctgaagcagtagtgaggtcactgcccaggtgccagcagtggtggcccacagggtaagggatgcttactgctactcctgtgccctccagtgtcagagaccagagatacaatcatggtgaacacacaccttcactccctaactcatcactcaatccatagatcaagagatgaaatgtcaataatccagagccctgcactgtgagtcacctaaatgagcagtcagcaccattttggagtatccccatcacttacgatcctgtggaataatatagtcttgactagtggactgactggttccctgtgccaccccctggaacccagctgtccaaaggacttcatgtctccccatagggatgagcctggagctcttctgggcatctggctgactctactgagggggttatgagcgtgccagagaggctgtaaaggggagaaaaggaccttggacccatgcagatccttctcagtcgtcacagggctgcatgaaaaaactgcaggtaatggcagggcccagacattggagaaggccttggaacatttcaaggaagggcaggggaatgctgaggacaaggcgagcaggacacatacgctgatcctgggtctatgcgggttctgggtcccctttcttccacttagactctcccacccgttccctgactgatttgcagttcatccaaatgtcttcctggtgatctgtgtacttgcctcattcttggaccacagggattattctgtctgttagctttctaaaaccaaagtggaccatgaaaatattttgctaaacccagagagtctttctgcataagagaaattctgttaccactttcttttttttccccctcttggctgcatacacttgtatgtagccacgatattttttccccacaatatttcacaagtgttactggaatttaaaactcttgttttgtatatggtagagactgactgcgttaacgtgaagtagacaataatttcctctcatttttcttgctcagaaatatctcaaaatcaaattcctcctctagctggattttataatgaggtatgacttttaaatctgattttatcatagcctacaaaataaatcttaaacccacagagctagaaaatgtcatttatattcatcagatctattattttgcctttagtcataatctcacccaaaccatcacctgtagtgtagctaggagaatattttatttttctaaaatcctctagttctacaaactccttcaggaactcacatatttaacaagctctccagtcaagaaattcattttcctatttctccctttttttaaccttggttatttgtcctttgaaaatctctgtaaaactttagcttagccatttttttttttttttagtttaactacacatatattgaacatagttaaatggaggaggaaactgcagtgtcaattttaaattcctcgagatttgatttgatagtactaacctgaataaaaacaaaaagataaatccagcatatgtgataaaatattcagaaagtttcttctctcctttaattatccttctttttgaatacaaaagtcatattaaattgctgtaataatgtaacattagggttgcattgcaatttcagaccatataattattaaactatgaaaaattgtaagacatatatatttaaggtaagctaaaatatatcattattttacttattatgcaggcagaaatgttatatcttcaacttacatgtctgagttctaaaataatattttccaattttctgttgattaaaatggacacaatctattgcaaataaataagattaagtaaatatgtgttagctgtttagatttacctcatactaaaggtaaatgaataggaagttttcaggtccaatgatctcattttatgaaaaaaaaattaataacttgaggtgttatgtgatttgtatcctgaaatgtacttgcaatttaaatcaggcaaaaacatctcatacttctgtgctgacacagcaaatccaattatttgtaaatatattgacataaatatacttttgtcattttctgatacgttgtaaaaaaaaaaacccctggatttcatggaaaaagcatgaaattctcagccctttttgtttcacaacatcatttgcttgtacaagtattttatgaccatgtaattcttgtttcattcctagaaaagccagtactagattggagtatttgggtaagtggtaggaaattgaaagtctctagggtgaaaaggcagagctagaaaacagcaatgggctgtgtgagaaggacaaccagagaggaacaatgatccagaaaatggtaaatatggctaaggttggcctggtctacttctcactgtgttacccaactgccggcatcatgtatacactgaggaagacgggaaataaacacaacttccacaaacttggacttgtcagttgccaattcattaagaatattgatcagcaatgtgacatactgattataattgttcatgatatgaataaagagagtttttgttataataactaagtgctaagggtaaacattttgttactgttccaacttttcagtctactgggtccctactccaaactctaccatcatcacatgtgcacatatggaaaataaataaaaatccaaataacagaaattttaagcttatgagaggctagaatatcataaagatactttcaatttcttggaacaagataattacacaaacaggatttgctatttttgccatagaaagaattttacagttagctatgagaaacgaacaataaatagcctaaaatgatacttaactggagagctgtgagtcgagtttcccagagctgtgtattcctactcacatggagtgggtacttcgttaagactatgttgaaccagactcaatgtgcttcccctgtcattatagcattggacaagcctgcattttattgttattgctcctgtggtttttcggtctatacaattttcctttcttctcactttcctacggaagttaaaagaaggtagaaagaacataaacagaagcagagggtatgatgaaaactgtgtcttagtccatctgggctgctataacaaaatgccacaaactcagtggcttatagacagcaaaaatctattactcacatttcctaaggctgagaagtccacagtcaggggcccagtagattcagtgtctgatgagagcctgttcgtggtcatagatgacaccctcacggaaaccatgtctctattacttcaaagctttggttaacatgtcttataatccaactctagctagggaagcagttaagatttatttacaaataacatgttacacagaatagaaaatggtgggaaaactgctttgaagaagaggaaattttaaaaacacaacagacaaatgtaaaggaacgagtacgctaattgtttcaaaggttaaaacaccgtaagaggttgacaggtgctatgggaatgggacagtctcagaatgggatcttcctacttcgagactcagagtatgtgaggatgacatgctttcttacttcttttttatttttattttttcttcctcatgtactcttaagcatcaaaagggacatgcaatgagagtttgttccaaatggtcattcaggaatccaggattcttccatcttgtgtttttgttgttgttgttgttgtttttgtttttgtttttgttttctccttgggctttttaaattacttttcacctgatcagttaattagacatgaaaataaggattgggtgagggaagcttttgtgatctaggcctgcaaatgtcacacttcaacgcatagtccattccccacacctaattttgggtgaggctaaggcaagtggattagttgtgtgtctgtttctaccactatatttatactgtaaaatatcatttcccatctaggccacttcaacagcctcctcaccatactcccctcctcaaatctcttccctctccaatatcttctccaaagagtatttgggtttggaatccttaatattgacctgtgattccctgtatgttctctctcttttaatctaatttcttactacactgcccttgctttccagaactcaggaccctgcgcctttcctgcacatgctcttctcccaccacaagtcctacatttcattggttaacttctactgacattcaaatcacataaagtaatacttagcaaagtgaggttattaatagtaataatacatttatagagtacatactattataatgcatgccaatgctaagtactttacaaatattaactcattcgattttcccaataactctatgggcaggtactgttattcaccccatttgatgaatgaggtacctgagtattagtaaaatgaaaaatctaccaaggtcactaggctcgtatgtggcagatctacgattcttgaacacaggcattctggtctctgattccaaacttgcagtagttgcgctatattgcccaaaggatgctttcttgggtaagtcttcctaatattctagttcaggacagatttccatggtatacatccttatgatgctatacacttttgcttcctagcactaaagcaagtaaagtttttacttaatcgattatttgattattgtcaatctgaccttttaaacagtatttttttttttttttttttgagacggagtctccctctgtcgcccaggctggagtgcagtggcgcgatctcggctcaccgcaagctccgcctcccgggttcacgccattctcctgcctcagcttcccgagtagctgggactacaggcgcccgccaccacgcccggctaatttttcctattttttagtagagacggggtttcaccgtgttagccaggatggtctcgatctcctgacctcgtgatctgcccgcctcggcctcccacagtggtgggattacaggcgtgagccactgcgcccggccttcaacagtattttttatggcatctaaaaccattaaacactttggctaacttgtattttcctgacacattagcacagtggctgacacatagtatatgcacaataaatttatctatagctaacagtagctccaatttcctaagttctaggtggatatcatttcactgatttagaatttttaaaattaaaataacatgtcagccaataaatagataaatatctaagaatcacttggaagtcaaacctggttaacttcttaaaaatatgtataagaatatgttgttattaagaacataactaatattttattattttatttattttttatattatggattgccataatttatgcttttttaattttattgatttagagtgtgcgtgcgcaggtttgttacatggacatattgtataacggtgaggtttgcacttctagtgtatccctgatcctaataaagaacattatacccaacaggtagtttttcaaccctcatctccctctcatcccccgtttttaggagtccccagggtctattattcccctctgtatgtccatgtgtacccattatttagcacccacttacaagtgagaatatgcactatttgattttctgttctgagtcatttcacttagaataatgacttcccactccaactatgcggctgcacaagacacaatttcagtctttgttttttgactgtatagtattccatgatgtatgtataccacattttctttatccagccacctattgatagacacttaggttgattccatgactttgctatcatgaattgtgctgcaataaacatatgagtgcaggtgtctttttggtataatggtttcctttttggtggtgcatggggttagatgcctagtaatagaattactggattgaatagtaattctatttttagttcttgggaaatttccatattgtttttcatagagtttatactaatttacattcccaccaagggtgtgtatgttttctcttttctctacatcttctccaacgcctgttgttttttgactttttaatgatagccattctgactggtgtgagatagcatctcactgtggttttatttacattttgtgatgattagtgatgttgatttttttttcatatgtttgttaaacacttatggtttttttttttttgagaaatgtctgttcatgtcttttaccctctttctaatgggggttgttttttatttgtagagttgtttcagttccttgtggattcttgatattagtattttgttggacgcatagcttgcaaagatttgtgtgacactttagttaaatggatttttcttatttaattttcataggaaattatgatatagatacattctcttattaacccctttttcctgattaggatatatggttagtttgggtaattaaattgtttaagttcacatagacactaaagtaagacagggaacacaaccagtatagccaaaatcaatgggctttttgccccttttcagcctttacttgcaaagatctgggagagaagactggggcctggggacctttcagatacaaacaaagatttgcaagtgaaacacttgagggaaatagaatccacgtcatctagaacctaagcacaatttccccctcacccaatcacaccctgtttcttaccactacatttaacccttgtctgaggagcatcccaaatggggaggaagcagatattgatatttgtcagaagtgggctaagaacagattccccctctcctgagttttgggaggcttttttaagcctctcatcaatcatgttcacacacattcaaagtctgatcaaatcgaagcgtaaacaggagatttgtttccaggccaagaagaaagcacgggaaaagcataaagatatttctcaccctctgaataacatgtatgttttgaatactctattccactaccatctgaatagagagccctctctggaaagactaacagctcagagactgtccactctgaatgtactggccacacagacatgcttagaacataaactgacagtcagacttgtctcaggaagagtaacctttctgaaggatggttctctctagatattctgaatgtcctaattctaatgcatacacattgaaaactcatacactccagtatagccatctcggatcatgaacatctctggcacattgacttcttcctcaatcccagccatctccatgatggtgtgaatggaggaaatctttacctaatcctcatgggtaacttatgaatgttgaaaaaagttagcagccctacttaggagaagaataacataggattacaaagtttggtccacttacaaagtctcatactacttcatcagctgcagttttgggttatttacatgttttgctgtccaaaaaagcatagaaactggctatgataaactagactgaccaaatcatacagatatgtgcacattgaatctcttgcacatatttcatattttatgtggattcagcttacaccctaaaaataaaaaaattaagattaagatctctactttagatgtttacttgattttttttttgttcaatacctcttaatatttagctcattcttttatatggatattaatttttcaccttttctttttaatacagatacaaattttggctactgacagatatatgtagtcaatctgtcccatcagaagagatattttaacataattcttccaggatattagttcagtgaaaactcacagggtccctttttttttttttttagatttttaaatgacacatttgacctaaaaaaaagattttctttatatagagtttttaaaacacatataattttacaataatgtcatttctaaatatatatctagaacacttagtcatccgatgtacagttaatatagctctctcacatggatcttagaaagaactgaaattgtacggatttgcctaatcttaaaaatactcactgggtagctttgagatatgtataatatctcagctcaaacttttacaagctctaaatctttaataggattcttaaacctaccctcttaaatatacaaatttattgaggatacatttatctaaaataagacagtagttctttaaggttaaaatattaattatgtaaaaattaagcctcatttgagaacaaatttgaaaagtttacagtaaaagttcaaaaccatgtcttctctcttgtaatgtctctcagaaggtgaaagaaatctcagaggctttgactggatgatgttcagtgcatgtgaaaaatggaaaaacagagagtgtcattgcccctgaagaaactccactttttttttcctggtattcaaaatcaagaaccgaagctgcacaaatacaggtatagctttcagttcatcagagtaatgattttctctgaactttgcaatggggattttgccaaacaaaaatgagtcaagggaagttttattttaaaaagtttagaaaaaaaagatagtgcaagtaatcacaagacattactttgggttgctttgcaaaagaccaacaaatctgtgaaaagtattcctttgaaactctattttctcttgattacaaagagaatttatatattacagtaatattaccacccaacctctgactttccccaatttttctttccagccaaatatttctcaaatatttctacttattttattcctccatgttctcattcacaatgttccttctgcctgaaatactaatctcctaaaaacctctccttccttttgtctctgtcattttttatttagtgtcttgtcctcctaccctagcctttttaggaactttttaatcttatgaatacaaaatagttgtacatatttagggagtacatgtgatatattgatacaagcacgcaatgtgtaatgataaaaccagggtaattgggatgtccataatctcaagaacttatcatttctttgtgtttagaatattgcgattctattatttttaccattctgaaatacataataagttattgttagctatagtcattctattgtgctactgaacactggatcttatttcttctaacagtatttttgtacccattgaccaaccgctctttatcctcccttttccagtacctttcccagcctctggtagccatcattttattctctgtctccatgagtttgatttagtttttagctcccacatatgagtgagaacacgtaatatctgtcttcctgtgcctggagtatttcacttaacatgtctttcagttctattaatgttgctgcaaatggcaggattttcttttctacagctaaaagatatttcactgtggatatgtaccacattttctttatccttttgtctgttgatggacacttaggttgattccaaatcttggttatttgaatagtgctgcagtaaacatggaagtgcagatatctctttgatacactggtttccttttttcttgatatacacccagtggtgaaattgctggatcatatggtagttctgcttttagattttgaggaacctccatactgttcaccatagtggccgtaataatttacattcccaccaacagtctatgagggctttgctttcccacatcctcaccagcatacattattgaatgtcttttggataaatcccattttaaaagggataagttgatatctcattgcagtttttatttgcatttctcagattgttagtgctattgagcatttgtgcacatacctggcctcttggaaagcgtatgcttacatgtcctaatgactcccttaattatgattacacttgtaaaccgtaactctccatgttgcattttctatactcttttacaatctacattcccaatttaagcttttagtatttatttaaacacgtttttatgttattctaggacggggaatattttacgtatctttatactcccacccaatgcccgttcccactgtaaccccaaacatacagtgcacatattcaacatttagtaaatatttgtttccatttacagactaaatgacagttcctttttattgtcttttttcctgtgctgttttctttacctttctctcgttccatcacagtaattaatattttttaatataaatgccatattgaagcaatgcaaataactttgggctctaagaagcaagagtcctaattattaatgtgaaagtttcataagcaggaagtgacaggagtacattccccttatcaaacagggctgggattacaaccagcagtttccagctcatcttgttcacatttgcattttcattacatgactctggaaatctggtaagaataagttattattcatttctttcccttcattcgtatgttcactcaatacggttatgcatgcatctctattaagctttgcatttgaaaccaactgtcccctgtaaaagctcaagtggacagacattcccccaacaaatacattttatgaaaagatcaatgtcctattatgctctacagagaagaaatatctaagcacattctcgtttttaacaagcagtgggaaaattacaaactaaatcaatatgtccaacagaatgcctgctcatttaccactgactcaggctattcctggagattcttctgcagctgtcttttttctacattttgttttcggaactgacacatggaaacttgaggactgaaatactaagacttcaaagctcccactctgtgtgggcaacatctttcactggcagcagggatgacacaaacactttcatcattgggctgaataataagccttcctccagggggtaactctatggagaaagctccctgcacccattatgtcagactacaattgagcaacttgaggaatgctggcccactggcacatacgatatttgtatattttgcaggcttttgtcccagtgattatcgtaaggctatattttgaggttaaaaaaatagtcattgaaatttctgttctgggcatttaaaaaatactctgagttctacaaaatgaaattattgttttgtgctaaaatatgactcttaatttagattttcctacagagactattacaaccatagaaaaattaaaactatttctcaagcctttgaagccaaaatattcagttttttttctttcaaaagcatcagtttggtgaaaaaccgattttttaaaatccaaatacaacaacaaaaagcatgcaccactgctcgtaaacatttatgtttatatcacaaatggcaattagggtaataagaatttctgagttgttatattgtgttcacatttttggattatacaaatataggtactgcttttaaagaactgcattcaaatatattattcacaaaatttctcagtaatgtagctttctatggacatggtaaatgctttcatttaaacattttgcagtctatttgtaacattacaatcttttacgtaaacctaagtctccaaggcaatggtttctgctaccttcttgccacgtaagccaattgcctgcaaactcattgtacctttgattcaggattgaaatataaccttgaattgcaagacacagtcaatctccctgtggcaggtagaggcttagcccttgttacacaagtctacctaaaaagctcccttacagattcattacttgaattatttttttttaatatgaaagaaaatcacaaatggttctggaagttctgtggcttgtcttccgcagcaaatacaaagcttttctaagactaccaagagatgagaagagtgtctgtaattctagtattatgtaaacatttgatatgctaaggaatttccatttaaaaaaccatagaaccatttaaacaccctatcaaattggaaaaccttttggaaacagttactacagaaaaataatgcatggaagtgaagtcactcaccacctagaatgaataaattagtatttatgtaaagatgtgatgtaaaatacaaagttaaaaaataataattcacgtattttggctgttggatctgagttaaatgtgacataactgggattgaattaatgcagagaatgagtttgtggttgccataagcagtagtaacagtaatctttttttttttttgagaaaggtctttctctgtctcccaggctggagtacagtggcacaatcacagctcactgcagcttcaaccctgcctggtagctgccaagggtaaacttcccttttacctcctgaatttttgcgaaaaatcaattcacaaaggcagaataatagaagaaaaggcattcaaatgtattagcatgcctgggggtgggtgtgggagggaattacagagtgattttcccaccatgcaataggaaaccaatggttatatagcctccttcttagagaataagagatggagaagtacggatgattttagggggtagtaaataattttcaggggaattcaatgggcttaaacaacatacagtgatgtgggataaagtctgttgagctcctgggcagacaacggtttgtaacaaaagtctgtctggatgtgttgacagacttgagtctttcttcccaccgtatgatttcggttaatgaaaattcagggaagataccagaggtaattgttttcttatttagtaagtccaaattttaggcagataagggaacttcagataacaatttgatcctgtgatttgggagacacagaagattgagagccaggaagtgtgttgtgggcagagagatactgaatctttttctgttgagcatgtcaaataaccccattttggggtatcggtttttgaaccctaacactaaaaatggaaacttatttgaaaatagggtctttgctttcctcttcagatatgattagttaaagatctcaagatgatatcatactggatttaggtttatccctaaagtcaaagttgctgtcaaccaccagatgccaggagagagagaggcttggaatggtttctccctcagagactccagaaggaaccaaccttgccaacaatttactttcagacttccagccttctgaactgtgagaaaacgcatttcctttttcttaagcgatctagtttgtggtaatgttttgatggaagccctaggaaactaatacagcatgtaagtaaggtgaaagttagtaagaactatattagtcggttctcatgctgctataaagaactgcccaaggctgggtaatttataaagaaaagatgtttaattggttcacagttccacattgctagggaggcctcaggaaacttacagtcatggacgaaggcataggagaagcaggcaccttcttcacagggtagcagaatggagtgggtgtcgaaggaaggggaaagccccttataaaatcatcacatctcttgacaactcactcactatcacaagaacagcatgggggattctgataattctgatacagttatctccacctggtcctgcccttgacactcagggattactggaactacaattcaagatgaaatttgggtggggacacagcctaggtcccccgagggacctaggtaattataattaaagaacctaggtaattataaagaaataaagttaaatattacaaaaatagagctgtttataatgaacatcaaaatctgtgatttaataaggcagtaatgttttatttgtgtttattttatatttttaagtattcaacgctaggagtatatttcttaattaaggtttttaagtgcaagaactatatgttattccaagcataaactatgatgtttgttgatatattttcataggttcatagaatttttgagtagtaaggcactttttagttatctctcctgaactcttaattttggagaaagttctgtgacttatttcaaaattacacatctagacagagtacctggttatgaatccttaccctcaatttccagtaccataaccacatcatcaattaaaataagcctgaaaaattattaaattctagttagtaggtaataactctggttctggttgtagttatatactaggaaacagcatttgattttttactttgggaaaaataaggttcattggatatttttaaatttcagtgtatattagtccagtctcatgctgctaataaaggcataactgagactgggtaatttatataggaaagaggtttaattgactcacagttcagtatggctggggaagcctcaggaaacttataatcatggtggaaggggaagcaaacacgtccttcttcacatagtagcagcaaagaaaagtgcagggtgaagcgcggttgggggaagccccttataaaaccatcagatcttgtgagaactcactatcacaagaaaatgatgaaggtaaccgcccccatgattcaattacctcccactgggtccctcccacaataatggggattatgggaactacaattcaaagataagatttgggcgggacacagcccaataatatcacagtgttttgttcctttttctctttttttctctctcccttgccttctttctctcttccatttaaaaatttttttctttctacttcataggaacagcattttccatatatatatatatatatatatatatatatatatatttttttttttttttttttgagacgggagtcttgctctttcacccaggctggagtgcagtggcgcgatctcggctcactgcaagctccgcctcccgggttcacgccattctcctgcctcagcctcccaagtagctgggactacaggcacccgccaccacgcctggctaattttttgtatttttagtagagacggggcttcaccgtgttagccaggatggtctcgatctcctgacctcgtgatctgcccgcctcagcctcccaaagtgttgggattacaggcgtgagccaccgtgcccagcccattttccacatttttttagaactgttgagactattatgttagtttgcctgctcagtggccccttaatcaaagagtcttaggcagagtaaagaaagatcaggaggtagtaaaattacaggcacaacaacagatttgatggctaccaatgagcataaagtctgaactacactagatgtttttgcaacctgatagacagtagtctgaagaggcacaacatctcagttctacagacaaaacactatggacattacccaggtttccaatatcactctgtataagtctgttctcatgctgctgatagagacatacccgagactgggtaatctataatgaaaaaaaggtttaatgtgctcacagttccatgtggctggggaggcctcacaatcatggtggaaggagaaaggcatgtcttatgtggcagcaggcaagagagaatgagaataaagagaaacggtttccccttataaaaccattagatctcatgagacttattcactaccacgagaacagtatggaggaaacctcccccatgattcaattgtatttcactgggtcccaccaacaacacatgggaattctgggagctacaattcaagatgagatttgggtgggaacacagccaaaccatatcacactcaaattgaaaacatgtatatatcagttttctagagaattattttttgtaatggctatgcaaaatacactctgctaattaagtttaaataggcccaaccaaatgtgattctgccctccttcctcaaccccatcagtaaagagaaggaaagatattgatggtcttcactgatatgtaatttttatgtatttttatctacgagaatatgcattctttttgtagtaattcttttttgttgttatttagtttttattttataatcataaacttaactctacaatccagctaggcatgaaagggaacaaggaaaacatggaacccaaagggaactgcagcaagagcacaaagatgatgggatactgtgagcaagtggggtagaggggtgctctcctgagcaacagaaggaatggtctggtggtgaagataaaacacaagtcaaacctattagagttgtccacagtcagcaatggtgatcttcttgctggtcttgccatttgtggacccaaagcactccatggcttccacaatactcacgccttccttcccttgccaaagaccacctgcatgccatccaaccactcagacatggcagtgcagatgaaaaactgggaaccatttgtgttgggtccagcacattctccacggacaagatgccaggacctgtataatttaggacgaagttctcatcatcaaatttcttcccgtagatggacttgccaccagtgccattatgctgtgtgaagtcaccaccctgacacataaacccaggaacaattctgtgaaagtaggaacctttataaccaaatcctttctctccaatgattagagcacaaaaattttctgctgtctttggaatcttgtctgcaaacagctcaaaggagacacgtcccaagagctcaccatccacgatgatgtctaagaacctggtggggttgaccatggctgatagaacggggctcctggcagcggtggcatctgcaaagccatagtaattcttttaatttgttggcaataattaagtaaagttaaatttggcattacttatgttttatatgagaaaacagaagcaaagttaggaaggtcatttacgttatttttttgagattttctagtcaccatatttatggattgttttgctgttaattcagtctaaaatacgctttgtagcttttttattcaccatattatatggaaagtacattgactactgtttcaaattaatcactaagattttagaaaacagattgttgtatgaacaatattcacatttaatattttacataagcctcattttgtctaaaagctgataagtaggaaagttataattagaacattacaaaatactatcttaaaattcaggttgagctgtcctttgaattcatctccacaatatctgcatacattcattaacttcagatgtaattggaaggcacataattaatgcaatggttctgaatgtttatcaaattaccaccaatcatcacggtttcttgatgatgctcggcaacagggtgcatggacatcagtaaaattctaattatgaattactaattgtaatgactccaccaggcctaaaatacagcatcactgtttaaattaaattaagttagttttattgacttcattattgaaggatgagctgtttcaagcagtaaaattttgaactgacattttaaatgatttctactgttataatgaatgtcaattcttctcaaagagggtacaacaaacagaaagatgctgaggataataggtcacacgaattaacacatgcttgcttatcagatgccgggaagagaaaggagtgttaaaatatattcacccatttttatttcagctgttcattttaaaaagaagaagcataaaaatatagaagcaatgacctaccatgaatttctagacaaaccttgtttacattccatgaatgtaaatatacataacatttattaaaacagcaacaaagactaccacccattctgtattgttttcgcgtacagcactgttatgctgagtctgcatctctccaagtttgaattcctctgctctccatcagcgaagcgatcattctctagtaagtcttttcatattataaactctagaagagtaatcttttaatcaattaaattatgaatttaaggaacaactcaaaattaattaatttcagaccccatcatattgaaacttgcctcagaaacacaggcaaacccaaattgtttccaacttcaaactattacttttagttggaaacacatgttaattgtttaggtataccaaaattaacatcttaattatatttttcacattctttctgacaagtagagtacatgtgccatagaagatactgcctgtattagcaaataccttctgtctgatattcacatactcagctcacttcagaggtgatttattcatgtgatctccagctatgaagctttgggtaaaaataagaacaaaacaaacaaacaagaaataacttcagtactgatcagccttcgtggttttattcttggaagtttcaccactgtgaaatttaagtaaatattttctagaccttgtaaagttgaaaaaggcctcctagtttatatgaaatatgccctccttcctcatctaaatagttttcactttgcaacaaagctaccgtatttaccgactgtatgtgttcttagtggtaaaatcagtctaaaaataacaatgttttatctttcagattgaagtaatctacccctaaagctgaacccattagaattctggatcataatcttggtgatttcttaaagcttcattgcaaattttccatggcagcaattttgactataataaatgccagctgctatcgtctttaaaagcataaaatgcttcaacttctcaaacagcatgtatcttttaaaatctacattaccctatttgctaatttgttacttctctcttttgttgcatcatattgagagaggaagggagcttaaatattccaaacacaattgatatcatcatcctctggccctgctttttcttttctcctttgttcacagaaggcaatggataaacccatgtctatatcacaattccaaagtagccaactcatcattgactctcgtggttctctcaacaagtatcattccttaccagtccttgtgttgctaagcttctagctattatttcttctgattttttttcttacaaaagaggatatagtggcatttatacgaaggctatttcatgaaaatttaccttggtgcaagtgatatgagctattaaatccatctttcggccagatattccattctgccttagaaagcccaatactaatccaagaaagacatggaaacatgaaattcacacttatttctaagagttgtaattgctgtgagttttcagcatatcttagcccatttggaagaatggggttttcttgaggctttcttgaacccggagagctttcggaatagtactttccaaggagtctgagatatttctttattttattttaggatagctttggtgctttctctgagggtggcttagggtaaatggcattgaacaagatggccttaaaattccccttagcttgtctgaactttatacaggcttctttttgtctctaggtaactgacctccctctcactctggaccaggtgggctaaccacagaggatcctgaccttccttccccctatcccttacagaacccaggttacacaatcacagagcaaaacattccaagcaagaggccctaatcacaaacttaatatataacttaatgtacttgacacaccccattgatcaatctccctgcaacatcctttgttacttttccactaactcaccacaactcttaaaaaccctaccattctttgttacagaagaggtaagttcagactgaattattgcctctctccccattgcaatagtcttgaataaaataataattgcctgtttaacattgtctgatgaaatttttcttgacaaccgtgaataaaggcagtgacgttaccatacctgttgcatgcaatgcttgaacaatgatatacaataggagaatttgagtgacaccttgcctgtgatcacttcaataaatatgaagtggtggcttctttgtaataattttaattcactttaacagataactggaagttgtattaaaagatagagactgagaaacacaataaaaggataatggaaaaaagccagaaagtaataaatttgccaattaatagaaattatctgtattaagctcttacaggacccttcaaaagtgttgaaatgggaactgcaacaatggacatgcacatcaaatagaatgtcctgctgtaactcttatttactaatctctgcagttaatatcaattactacacggcatcaaccctgttctgcactatattgttgatgataggacacctgtattccaattatttttgaagttagagacatgtccaatgtttcctttcaacaaaccagtatactctgtgtggacatgctccccctggcctactctcaatagggttcataaaataggcttacaactgagatttatttttctctgttcaaatgaaagacatgttgtattctgatattaatactaatgaagactttggctctattcactctgcaaatgatgcccccagggtagatgaggaagaatcttcaatcaatgtgtgcatagttttgtattggcttatttattttaatttcagtgtccataactcctggcactattagaatattcaattataatgtagtccaaagtgctataaaaataattttctcttaattacactatgtccttttatctgcacattatttttaaaaaataactcaacgtattccacttatggttatactgaacaacaatatgcttttcgagtctttggcaagtcaatgcatattttctaaagaaaccttaatgtaattattatttcaaatgtaagtataatttcttccagagaaacccagggaagaactggaataaaatattaatgagaaaacctcaacgaaagtacacactaaaatattctaataaataaaatataatcaaattatcaagctggacagtctgactccacagtccttgctcttaattattttgttcagaagatacgttaagaaaatgggctttccttcaaaaaaaactcagatagacggggcgcggtggctcatgcctgtaatcccagcactttgggaggccgaggtgggcggatcacgaggtcaggatatcgagaccatcctggctaacatggtgaaatcccgtctctactaaaaatacaaaacattagccgggcgtggtggtgggcgcctgtagtcccagctactcgggagcctgaggcaggagaatggcgcaaacccgggaggcggagcttgcagtgcgccgagatcgcgccactgcactacagcctgggcgacagagcgagactccgtctcaaacaacaacaacaacaacaacaacaacaacaacaacaacaaactcacagatacgtaggtaaaaaagataatacttggtaacaatgaatggtagtaagtgattatgggacatttacatttggtaagcctaatatgagttaactaacaacaatagtaatatcaaaactaataatagttctggaaatagtaaaagctaacgtgtgattagcactaatcatgtgctgggcctttttctaaacaccttccctaaagtatttttatgtaatttttatttaatcctttttaaaggatacatgagatttacgatgaaaaaatggaaaaaaagatatgtagtttgtccaaggtcatatttgcagtaagtgagaaaacacctcctatattttccgttcattattattacttctttgcagaatattgatctcagcttggggaaaatttataccacacttttgtttcttttccaagagttcataatttggtgtacagccacccttatgtgtgtgtctgaaatagtctttaagaattatctctagtaaagtaaaacaagaattaacttactgaattctaagaaaacgtgctattgtcaaaagtttaaggagattcttcccaacaatcttctcacacaaagacacacacacacacagagacacacagaacacacaccacaaaaacacaaacatacacatgtttgggattcttacatctctgcaatcttctcacacaaagacacacacacacagagacacgcagaacacacaccacaaaaacacaaacatacacatgtttgggattcttacatctccgcaatcttctcacacaaagacacacacacacagagacacgcagaacacacaccacaaaaacacaaacatacacatgtttgggattcttacatctctgcacttatagattaagctattatttttatttttaaaagcatttttaatatgtagcaccaaacacagtgtcactaaatacattttctggattgaaaaattgaactaaagcctaggtgtatttcactcagactagaatatcatcaatgacccaatgaattttgtgtttgtgccactcatcacttaccattttcctttaaatgttttggaattcactctgaaaatatacagaggttgcatgctacagtaatttctgcaacagataagtttttacttgatccaacacattttcggttttgttttagttttagttgttgctgtcttgtataattttggtaaaggagttaccatgagaattcattagagatttttttttcttgtcataattgttgcaggctaggttctcttatgctgattcatgttagttttctcatattagaggagatgcataacacatgtgttttgaattgtatcttccctactacctagaaatgcttttgtatcttaaaggggagtaatagctccccctttcacattatctattaagtctcttttgtggctgttacaggtattctaaaggcacagactttgatgtaccatattagggctaacctctcagaagtggagttttttttttcaagaaagcacagtttgaaaaggcaaagaaatatagcttcagtcaaaatggtttgataaagagccaatgattttccttttagtgaaacaatctgaaaatcttagaaaatcacattctgaatgtctgagtggttatattactatttatctcactctaattaaacagacttataagaatatttactactctctctaccagattaaaccaaccagaccttattagttcaatatatctacagaaatatcaggcaggtatatgtatacacacacacacacatatttaacttttatttcaggttcaggcatacatgtgaaagtttgttacataggtaaactcatgtcataggtgtttgttatttcatcactcaggaattaagcccagtacccaatagttatatttcctgctcctctccctcctcccaccttccaccctcaagtactcaaggagatcccagtgtctgtggctttatgttcatacattctcatcatttatctcccacttttaagtgagaacaacgagcaagtgtattttatcaaaattaagaccaaaacatcttgttttaaaatatatgcaaatagttactggcattaattatgattagacctaatggaatctttttataattttgtgtctgttttaatttgcattgccactttcaaaataatggttgttctccataccttctggtctgatagcaaaactttttcttctgtactaaagatcagcatatagagaatatcctatattacaaaatgtgttacttcatcttacgttctcaaccccatacactcttgtcacctttgtaaagtgagagagctgttaacagcagtggcctaagagatgctgactgaaattaaacttcattttcaagtacatttcacagcactttgtcatgacaagtcctttcttatgtgatgtggtctcagagactgccagacaggccaaaatggtaaaagttcattatcatttggataaaacttccctaattattaaacaaagtgaacaatacctagaaatgtatggcaagaagggagaggaaatgaacaaattaagaactctaaatagaacaatctaatgtggggttttaatttgaaagcaacaaatgacaggccagcattttcaattaacaaataattttgttacaataattcttttcttatagtatttgttttggttgttcttacttgattgggaaagatgaacctaataattatgtaaaaattacgaacacctgaaaatatacacttctatttcacaggcagattttagagctgttgtacaaacaggattttaaaaatatattgcatagtcgggttctgtgactcactcctgtaatcccagcacttcgggtggctgaggcgggtgatcacctgaggtcaggagtttgagaccagcctgaccaacatggtgaaacctcgtctctattgaaaatacaaagattagctgggcgtggtgatgggcacctgtactcccagctactcaggaggctgaggcaggagaattgcttgaacccaggggtggaggttgcagtgagccgagattgtattgcatacaagctaatacttttatagcttctcattgaatattcttcatattcttgcccaatttatgtcccattaaaaaaaaagtcttaaaatccttcgaggttgccatatagatttacaatgtgagcttacacgtgttagaaagtgattattttgtagatttgttttgttttggtttgattgccagtcatgcagagtattctgtgtatgaaataccttttgcaaattgaagcttactaagaattaatagaatcttagcacaataggcttggaatacatatttacttttccatcaaggtcagttttctcaaggccttactaacaagtgagattcaacttacaattgcatagacagaaagtgatctgtcctttttttgtgaagtttcattattcaatatttgaacagatagaactgcacatggaataaatatcaaaaggcaccaacagggctatatcaacatgctggagtctcttcatcggtatcccacagcttctagactctaatatcatagataaattttattatcaattcctctctatttttcctgagatgtaatatgcttttataaatatatgcctaagtactataatatttaatgctttttaagtatcatagcttagatataatatactatcagtatgtagaaagctctgtcatttattttaaaggaagcttagtatttcattgaaagaatgaactttaatgtgttttaaataagcatttaaatatttttgcctcaggaggctgaggcaggagaattacttgaacacaggagtttgagagtagcctgggcaacatagaaagactctttataaataaaataatatgaagtatttttcccaaagttttccttttacagacaaaattgcaatggatatctacattagtttggattctaccagaacctgataaaaggactagggtacaaataatttatttggtagtcatctcagaatcacatgaaagggattgaggaagacacacgcggaaaagagagaatctaataaggagtgtagtttcaagacacttaccactgtgggaaactgcagctcagtgttgctggggaactgaggcagacagggtagaacatgccttaggattattccaactcagtggccagaaagctaagcatgtatccaataattccccatccactacaacattaattaaaggaggcctacaggaggtttgctctctagtagttttggatttctttgtgtatggtctgaccatgctctcagagtcagaaaaaaatcctcagaaataaaatgcagactttcacatgaagtagccttcttcttgtaaagatgtagaaagaatataaatagggagattgaaactgtcatttacattatccttattgatatgtctttttgtgcaggggtagggcatgtccatttttggttttgcaaatgaccctctgtactcccaccggcaatgtatgattctttccattcatttttccaatcacagaaatttaatcaatttcttgatatttgttaatctaataactgaaacaaatgttcttttactttagtttcaattttcactaatttcattaaggttgacatcaagctatttttttttaatagtctgggtcacttttcttttttttttttttttttttgagatggagtttcgctcttgttgcccaggctggagtgcaatggcgcaatctctgctcactgcaacctctgcctcccaggttcaagtgattctcctgcctcaacctcccaagtagctgagattacaggcatgcgccaccacatccggctaatttttgcatttttaatagagatggagtttctccatgttgatcaggctggtctcgaactctggacctcaggtgatccgcctgcctcggcctcccaaagtgctgggattacaggtatgagccactgcacccggccggaagtctgagtcactttgtttttccatgaactgtctgttcacatatgtgacaattttaaaagtcagatggttggtctgttccttacaatttgtacaagctcctcacatattgaataaataaaatatttatgatataagaggaattatagttaactagcatcattcaagtgtttcaggtgtttaagactgaagaaaaagagcacggactttcacaaactgattggtacatggatattattcagctcaggggataaattttcaaatttataatatagaaagtcctatcactttatattatctccagcaacttgcatggtttaaaaaattatctcatactattttccatgctctaattttttaaattttatttttaattgacatgtaataattgtccatatttatgggatacatagtgatatcttcatactatgtatatatgcttagtgattagatcagagtaattaccatatccgtcatccaattgtacacttaatcatctcaaacatttatcatatatttgtgttgggaacatttaatatcctcctgctagctatttgaaactatatatcattggtaactatagtcatataacagtgctatgaaaattagaacttatttctcctatctagctataacagatctttccctatcctgttgggaacaagccccccccaaaatctggccataaactggccccaaaactggccataaacacaatctctgcagcactgtgacatgttcgtgatggccataaagcccacgctggaagactgtgggtttaccggaatgagggcaaggaatacctggcctgcccagggcggaaaaccgcttaaaggcattcttaagccacaaacaatagcatgagtgattgtgccttaaggacaagctcctgctgcagttaaccagcccaacctatgcctttaattcggcccaccgctttgtttcccataaaggatacttttagttaatttaatatctatagaaacaatggtaatgactggctcactgttaataaatacgtgggtaaatctctgttcggagctctcagctatgaaggctgtgagaccccgatttcccacttcacacctctgtatttctgtgtgtgtgtgtctttaattcccctagcaccgctgggttagggtctaccagactgagctggtcttggcattatcccccttttcccctatctttccagactccagcatattgtgttttactttttgcttctacaaaatcaactttgtttagcttccacatgagtgacaccatgcattgttcattgtgttcctggctttcgtatttaacacaatggcctccagctccacttctgttatctcaaatgatcgaattttgtttttatggctacatagtattcaaatgtggtgtatatgccacatatatttcatttgttgttggatccctaggttgattccatatctcagctattgtgactagtgctgcaataaacactgagagtcaggagtctcttcaatgtactgatttccttttctttgaaccaatgttcagtatttcggtaatggatgatatggtagttctatttgtagttggcagaggaacctccatacttttcaccatagtgtctgtattagtttacatttccacccatagtgtgtaagagttccctattctccacatcttcactagtatttgatattttttgtcttattgatagtatcaatcttaattggggtgggatgatatctcattgcagttttgatttccatatctctgaagattagtgaagttgagcattttttaatatatttgttggtcattagtatgtcttcttttgagaaatgtctgttcagatcttttgcctattttttaattggatgcctggtttgtttgtattttctttttttgagatgattaagttccttgtatgttcaggatattaaattctatcagataaatagtctgcaaatattttatcccattctgtatgttgccattttactctgttgattggtttctgtgctttacagaagcttgttagtttgataaaatcccatttgcttaattttgcttttgttgcctgtgcttttgaggtcttattcataaactatttccccagactgatgtcttgaagcccgaatttttaatatcagaaatatttgacaatttaatagagtgcttagtattacaataaagtggtactaaagaataaacatcattgcagaacaacgcaatacaaaaaaagcagggagaataaatagaggtgtgtggcctgcaaaaaccttagaagactctgtggaaacagtaagaattcaaccaaaacttgaaaggagtaagatttaaatgggaaaagaaaagtatttagagcatgactcttttaagaatggcataagagaaatcatgactatagatggattagtatgttgtactagtgagaagaacagttgggcatctattaaaaatactgatgaatgataatgaattctgaagaccttgaatatattaatgctttgggcaatagaaggtcattggagattcttgaattatgcagaagaaaggtgttttaaaggatattctccaaaactaacctgggatatcaatgtgatttgtattgaaagaaggtgaaaaaggaaatagagacaccagataaaataatgtattataaaatatctacttaaaagaattgctagagaaccaggtgtagtggtgcatgcctgtagtcccagctacttgggaggctgaggcaggagaactgttttaactcagaagttcaagtccatcctgggcaacatagtgacactttatcactgaaaaactttttttttaagtaaataaagtcctatatcacttaattatacacttaaaaattgtaaagatcgtaaatgttatatgtgtattttaccttcattaaaaaattggccggccatggtggctcacgcctgtaatcccaacactttgggaggccagggtgggcggatcacctgaggtcaggagtttgagaccagcctggccaatatggtgaaaccccgtctctgctaaaaatacaaaaattagctggtgtggtggcagccacctgtaatcccagctactcaggaggctgagttagaagaatcgcttgaacccaggaggcagaggttgctgtgagctgagacagcactactgtactccagcctgggtgacaaaataagactccatctcaaaaaaaaaaatctacaaaaattaaaaataaatgaataaataaaaatacctcaagatagtgaaaagaaaaaagacttggtaaaattcgagtggctccgtgatatgtgtataaaacaataaactgaatgtcttttaaaatacacatttcagaatgatcaggaaagatcacatcttgagattatcattgtataattattatatttaaactttcagtcaaaaactcaaggattattctgagtataattatagaaaagcattaaatatatatttgtcatccccttaatattccaatatctcattgtaagtgtaaaacactgtcaaaatttaatactcaaactgagatttagtacctgtatgctggtttgattaggcagataaaaaaatgtattctgtaaaactttataatggggattttgagaagtatagttttctcacctaattttgcctctacaacattcaatctgcaatagaattttgggatgatttcattaacctctttctcattagagaatgaaatattcagtcaactagaacattaaaagaaactattgcgctcttcctctaatgagaggaagaacttcaaccactctggtttcagctggattaatgaacagatccccttttccttactgaagtagctgtgattgaccctaacttttcttgccctaatacaaaatcatggagacgtgattttcagggcatcccaatttgctgtctcattaattctcatttttatttgatgggttcttaggcactagtgcctctgcttctttcatcaatactaccttctctttaacttgatcttggtgctggccacttgaagttttgtaccacaggagtgttgatgaaagctcatggaaataaatcaattcatcagaactgttgtaatcagatattcagcatcaactttcactttgtgaaaaactaatgggtttggtaacaaagtggctatgaaaggcaacggaatgagatttgcagtttatatttctcatttagcccaatgcttttctttaaagtatgtgtcactgaaagacagtgttcaatataaaattgtgtttatcataccattgaatatgtatactcaaagttctattgatgatgtaataatttgttttaatgttaactttatgtttgagaaaaatagtaagaatatttagttattttaaggtaattacacattatcaactggaatcaatgaatatttcaaagccaccagaaatcatagaaaattgaacagttgtaggggattagtttaatatcaaataagaaccaagaactttgacacaattatttttggtgtggcaaagtttgctagctaaccatcaatcccatttttcttcattttgggcacacaagctatattttacatcctctcttacagttaagaggagcaatatggttaagttccagccaattagttctagcattagcagcttccatgtggtattaaaactttcaacgcagactgcaagaattgaggcttgtgagcctccgcctagatttcagaagatgtatggaaaagcctaaatgtccaggcagaatcctggagaacatctattagggcagtgcagagggaaaatgtgtggttggcatccccacacaaagtccccactgaggcactgcctagtggagctatgaggagagggccactgtcctccagactccagaatgatagatccactagcagcttgcaccctgcacctgaaataaaacgtaacgtgacacacaccaaaaaacttcccacaaactataattcacctccacccccactttgtgaccttggaagccaggctttaaagatgagagggccaaaaatacaaagggtgacacaagccttaacttgccacttgaagtcaatctgcctgtcaatgatgcatattaattttgagctttccatgagtgagagtttacattgttttaaacggttggaattttgcaatttattgttaaacaactagtttaatcttaattaaaatactcagaaagagtttttagaaaagctgtcttaatacatttaggctgctttaacaaaataccttagatggggtaatttttcaataatagaaatgtatttcttcagttctggaggctgggacatccaaaaacaagggtctagtagatttggtgtctggtgagggcttgatccctgcttcatagatgatgcctcttgctgcatccacacatgacagaagtgatgaacagctcctagttcctcttttataaagttgttaatcccattcacaagagcttcacaatctatgtatttttaacaaatttagcatttacatctgtaatcttaaaggtaacttattacctgcagtctttgtctccacatatgcacaaattaaaagtatacattccctgttcaaattactatgtggtttctgtctcctaattagacccttattgaaacaataagattaagtggatattctctgagatacccagacataattctacaggataccttaattgtcagcagccctaactattctctacagataggaaatatctgaatgcgctgctgggatatctaatcagccccaatgacactgataactaagtttctccaactaaatagttgaaccacattaccctacagtgaggcacacaggaggcaagtgacatccacaagcctaggatttaaactcaggttttcattcttcactttaaatgtaaacagacaacaaaggattacgaaacatctgaggaaaacttctttaagaaaaaggtgaacaaaacaaagagaaaacaatttgagaagtgaaaattatgtaaaaaggggaaaagttaaaaataaactagcattaatactatgagagttaagaaaacataacacatggcaaccatgaaaaaaatgatactatataaaagatcaaagaatattttggtaattgaagcataaaaacataaagcaagggtaaaataattaataaattaaacagacaaattggaatataaagttgacaaaatctccctgaaagagaaaactttttaaaataagaaaaatagaagatttgatatcagaagactgctccaggtaacccagtatttaagcacatgccatttcagaaagagaatagagagggggagaataatatacataaaataaaacagaatgtctccataatacaagaacataatttgacacgtcctgcataatgtttggaagtggaactatatcgggaccgtcacggtggctcacacctgtaatcccagcactttgggaggccgaggcgggtggatcacctgaggtcaggagttcgagaccagcctgaccaacatggtgaaatgccgtctttactaaaaaatacaaaaattagcctggcatggtggcacgcacttggaatcccagctactcgggaggctgaggcaagagaatcgcttgaacccaggaggcggaggtttctgtgagccaagatcatgccattgcactccagcctgggtgacagagcaagactccatctcaaaaaataaaaagaaaatagaactacaatcaaatgatgaaattccaggacattgtggacaaagagaaaatgccgtaagatatgaggggaaaaaatagtcacatacaaataacaagggagcacaacgccctcaggctcctcagtggtgacactagaagctacaagcaatgaaacaatgccttcaaaatgttggatccaagttgctttcaactttaaatattaatccaaaactaaacactcaggaaagaataattacatttttatttcacatttctaaatatctttctcccatttgtccttctagatggttctggtgtatgtgatccagtaaaacaaagtagctaaagaagaaagaggaaacgttggggtatatgaactagatattaagtccccaggataattcttaaaggaaatctcaagatttcatctgtgcaacagacatggagggtaaccaggtcagaacagatcagccccaagtgctccaagaggcatctttagaaagatgaaattgatgaaacgtctgatgggtaggaatgttgcaagaagagatttagatataaacaagtgctgtggagcatgtacattacaagctaagcaaatcaccaccaccaacaccacaaaagataactatgaattacagaaatcatagaaaatttacagaaaaatcaaagtataatttacttcataactagctaagtgtttgcattgttttcataatataaacattgatctaaccaaaattaccatgtaacaggattgagaagacgagagcatttaagtaagtaatgggcgaggaagactaaaatttaattattcttctatgtcaaaaatcaataatgtttaaacctaaaaaatcagaagttaccaacccaatcacaaaatttagcagtgaggaggtaaattgaaagactgaactgatggagaaggaatgatagaagagaaaggaaaaagaagtggagaaacagaaaccactctctttctttcttttctttctttctttctttctttttttttttttctgacgaagtttcgctcttgttgcccaggctggagtgcagtggcgcgatcttggctcactgcaagctccgcctcccaggttcacgccattctcctgcctcagcctcccgagtagccgggactacaggtgcccgccaccacagaccagctaattttttgtatttttagtagagacgggatttcaccgtgttagccaggatggtctcaatctcctgacttcgtgatctgcccacctcagcttcccaaagtgctgggattacgagcatgagccactgtgaccggcctccactggttttcatgagaagccttggggagttattttacgctttgaattatatgagtgcattaatgtcataaaaaacactttaaaaatattaatgtcgctgtatttgtggattaaatttgaaaaatgttgttctaatcacctgttagattatttcacatttctcatacattttgtagcagcagtttgaggaaatgaaacattgattatgttaactaacttaaaatatataatgtaatgaaagaaaaattattcgtgtggtataggaatagttttgctatttactgtaaacacctttttctctacaattcaaagatagtctggccatcatttagccagaatgttaggttctttaaaatgttacctgtaatgacagaaaaatatatttagctattcttcataaaatatgttcatctttactagagtttcactttttgtaaccaacagcttcattttattattagcataatctaatttcatgataaaataggtaatgtcttcaaggggtatactttctatttttattttttatttttttctggagacggagtctctctctgttgcccaggctggagtgcagtggcatgatctcagctcactgcaacctcagcctcccaggttcaaacgtttctcccacctcagcctcctgagtagctgggattacaggtgcccgccaccatgcccggctaatttccctatttttaagagagacgggtttcgccatgttaaccaggctggtctcgaactcctgacctcaggtgatccgcccacctcagcctcccaaagtgctgggactacaggcatgagccaccgtgcatggccgcggtatacttttgaatgcccttgtttcagtcaaatgttgatggtattacataaattggagacacaatttttttcagagctgaacttagtgtgtttcccattacaaaggtcaattaataataattctgtgagaaattagtgggtatagtgggtataccagcatatacccaaagcatagtagctatatcagcacacaatttgtcaatctcctccaactactgatctggaattcacttataaattgcctctttatctatggctgtttatgttttaaacttttatttgtctggcctgtgaattagtagtctctagttaaaaacacatacttttaatttctgcatatgtggagacaaagactgcaggtaataagttacctttaagattacagatgtaaatgctaaatttgctaggatactatttattattgtagttcttctatttcacttctcatttaaaaactacaaaacctctatcaacatgttgcttcaaattaaatttggttgcagactaaaaaaaagtttaccagttaggcaatgtaaataggattttttcctgtttatgaggaaagaaaggacagttttactgctttcgctttatccagtcacactttatctaggaagtggatttcatgaaaaatacttctaggaaaataagagggggcttgttgccggttatcccctttatagctcctcctgaatcgaaagtttttttgtcttctccacagctatttctattctgtcccatttctggcttccagattttaaattagtaaaacaaaaaaaatgattctagcaacttgggttttcaaacaatttaataagttgccttaaatattctttatcttcttttcattggacttattcaagtaaagattggataagttttttttgtcagaaatctttaaggaagagttcccatatttgaaaggaaaccaaatcacagtaactccaaaattccttctaattccacatcattatggttttgaagtcaccaacattcttacaaatatttccgtatatcagatgaacctaacatgatgagtttagggtggcaataaagtctagaatagatgaatatacacaagtggttatattacaaaatgtacactacaacatagctacaatacaaggtgatattacatgctttatgttttcagactttaagttcatcctacataatttcaataataatgaacttttaattttggccaattagtactgtgcaggatatagaataatttgaaattatcagccattatccttaaggttcattctacatgaatgttagataattatgctttttagctaattaaaactgcggtaattgaattttggacatcattgtccatataaagcattttataaagaaataatggatcctaaggtcttaggagctgttggacaaaaatcactgtggaaagtttgatatttaatctcgctgcaagcaaaagttggaagtagagaattccgttgaaagagcagcaatatcttagcagttcatctgaatagagaatcaaaaatgatcttgatccaagttgtgtacatctaaatataacaaggtcttgccactaactagagactgcgcaaaataaatacacataaccggtgagatgaaatctcacgtttgtattgagacatgagcatcatgggcctggaaaggtttcagcaggactagtaatattctgatattatacaaaacctgtgttcacctgttaacctgactgaatatgtcacggcttgttgtttgtttgtttgtttgtttgtttgtggtgaagaaaatatgtgatttgttccctttgtctttgcctttttttaaaatctaaacaataggtttatcatttggtatttaaaccctctctcttttattagttcacgatttcttttttaatagtacagatgtttttgtttttctgtaatgtttccttcagggaatttttttccacatttcattcatttcttactccttcaaccctcgtgctgatgctgaccattctcaaaggtaaatcacctgacatctaaaactgcttgacagcattgagagcatttctaaaatctataagaacagcactttaaattttaaaggatttttcccttctttctgagtaacggtaaatctggttgatgtcaatcttggactgatagtgttgaagtcacttggaagactgcattcattaagtagttttgatgagaacagagttctcttaatgcattttcaaaatggataaatgcaacacacacaacagaaactaagtattattctcaaagaaaaggaactactttttttggagttcaaagaatgtttgctagatttatgttttaggtctttattgacaaaaaatatattaaatatttttgaaacctcttttagttgaaaacagaatgatagttgaatatttaagcaggtaactattcatataaatagttttattcataaaaatacctgatggcaaacatatatttcaaataaaaggggtgcaaaatgttaattttcttgaaacggagaataactgctaatgttgttacattatttatgacatttatagtccaaaatattttctgtgaatttggactttaaaacacgtaggagtcccgctggaaattcacacttaataatttgcacccaaacttcataaatctacggtttccacaaaagccagagttcatttgtgttgccataaaggaatacccgagactggtaatttctaaggaagaaaggtttatttgactcatggttcttctgcaggctatacaaaaagcattgcagtggtatctgcaactggtgaggacctcagacttcttccactcatggtaaggggaaagggaagctggtatgcagagattatttggcaagggcagaagcaagagaagggagggaggagtcaggatctttttaacaatcagttctcgtgggaactaacagagcgataactcactcattacctcaagtacagcactaagccattcattagagattcaccccccatgacctaaataccttccctcaggccccacttttaacattggaaatcagatttcaatatgagattggaggtgacaagtatccaaattatatcaccaaccttacttacgctgatatttgtttaattagagttatatttgtgcttctgttttaaaatgtaatagttgctcagttaaactgcagaccttacccctgagatgcaattgttacctctgaggtcttaagtaacttgttcaagatcatgcaactagcacatcatcaaaataaggatataagtccaggcatctacctgatgtttatgctcataatgacttggctctaatccacggatttaagaaaaggaagttcagagttttcagcctatataagcagaactcagtatcaaagtatagtttgataatgcatgattttataaatttaactatacatcgggtgaaagatacctcactttagagtagaaaactcaaatgctcagagaatatgggaagcattccaaggacaatctaaaacaaaattaaatacagatcaagcaaattttatctttaaagtaaaattaaaagtgaaccagctgtcaaataaaatgtaagaatgaagtaatgattagtgatattcataaggtttagtcagtggttgtcaccatagctgaagactttattcataattctacaaatagtgttggaagtgtgtctcttgagaaagaggtgaagccaagtggtgattttttttccttcaatttaggataagaaagcaatggatgaggaattaaaattataaaaaaagtaattgatggcagaatttcccagtgcaggcattagcatcaataacctaggattctggattatattttcaaagagtaatatggaagaaaagaagaatgaataagaattgaggagataaaggggagcaaattgtgaattgctcaggcttgatgtggatatgctcaattagttaaagcaatgtctttcatcctgtgaaattgtcatgacagcgaattgagtaatccttcacaaaggaaaaaagcttctcaatgaatatttaatttttctcttgaaaaatgcaaaatccttctgatgtacactgttatggttaaaccgataagtaagaacaacagcaacagagaaaggaacatcaaatttccatttgatgattgcttttaaaactgtgtgtgaactatcatataatagatctgctgccataggcatcactttgtttctatgattattttaagcaggtttaataagttcttctctttacttgataattaccagcagtagacatgacaaagttattaaaaagtcagcaaggttgtgtatgaaatctgacatctttgtggaatcccaagagtatttccaccccatttttaaagtttgtttggcttctattacataaaatcttaaaaaaactgcttaatccatttttaaaaataacaaataatacatgttatatgacagattaacacatatatatttctcgtttctccttgatttaagaataaaagtatttatgcagcaggagtcagcagcatgctgtaatgtagtaacgatctgatcagagtgaagtacatatgttttcatccttagaacttgctctgtctaggcaaagtggacttacatggttttcactcctgtgtggtggccctcattagtggccaccataatttataatatgtgcaattataatatttataatatgtgtgatttgtttatatgactggaccctcccaataggttcatttgccgctgcctaaatagagctgatttatcaagacagaggaattgcaatagagaaagaaagcgtttaattcacatagagccagctgaacagaagaccagagttttactattactcaaataagtctccctcaaaatttagagagtggggttttttaaggataatttggtgggtatggggccagggaatggggattgctaactgatcgggttggaaatgaaatcataggaagtcaaagctgtcctcttgcactgaatcagttcctgggtagggccccaagaccacatgagccagtttattgatctgggtggtgccagctgatccatggagcgtaggatctgaaaaatagctcaagcaacaatcctaggttttgcaacagtgatgttttccctagcagcaattggggaggttttgaatcttgtggcctctagctgcatgactcctaacccataatttctactcttgtagctaatttgttagtcctacaaaggcagtcttgtccccaggcaagaatgggggtggtttcaggaaagggctgtaaccatctttgtttcaaagttaagctataaaccaaattcctcccaaagttagtttggcatactaccaggaatgaacaaggacagcttggaggttacaagcaagatggagttggttaggtcagatctttttcactgtcataattttctcactgttataatttttgcaaaggcggtttcatgaccacctctatttttgaaagacaaaacatacaattttaaaaagagaacattttcaaaaataacttctagtcaggattttttttaagcaaagatgataagaatctacatatagagctcaatcttgtttgaaattaggaacccaatattataaatagcatgatttattaataaatgtaagttcttgattaggttgggccctacatctctaacttgtataataacttcccaattcttcacatgaaaactttattttcattcaaatgaaaagcgggcttaatatagttttggatcaaatttttccccaatcttggaagctctgaggctattgtatcatgcatgatagaatcatgtacactttatctgttcctgcaagcaaattattagtattttttttgagaaaccattacggaatgtgttaataatgataaattacttaaaattgtgatttaaaggcatacaacatattatggataataagagctaacatatgttgattattcctgtgtgacagccattcttctaaatgttttacatgtataactcgtgtaatgcccacagcaaccctatgagataaagtgctagttcctgttgctgctgtaacagattactataatcctaatggcctcaaataacacaaactgattttcttatagtttgggaggtcagaagtctaaaatgattcttatggggctgaagtcagggtgttgataaggttggtttccttctggaggcctccctatagaatctgcctcaggcctcttccagtttccagacgctgccaacattccttggcttccagccacataccctaaatccccttctactgtcacatcacattctcctcttttgtagtacagtctccttccgtctccctcttataaggacactgttgatccaataggcccacccagataatccagtgtaacttccctatctcaagaacctcaacttaaccacatctgcaaagtcccttttaccatggaaggtaacacatttacagatcctagggattctgatgtgggcatctttggggcactattattctgtctatcacagataattattattctcattttataaatgagaaaactgaggttcagaaagagatcaaataacttgtttaagattatacaactagtgagcagtgaagcctgaaatcaaatacagtgagtctcccactcttggccactgtatcattctgcctttatgttagttggaggagaataaaagcaccaaatgtaaaatcttggattatccagtgtagctcttatttccggaaaaaaggatcctaatactgagtccagcctgaaatgggctccctaggtgtggatgacctggcggccctcattagtgtgtacatcaatagtaatgttaacaatgtctatgtcggttgtccccaggctcctttagtgacagaaatatctttctggctcaggtgtcctcgataatgtgcagccaccaaggcaaacttcctatgatgccttcattgctgagagtctaccttgtgttcctgtaatagcagagctgtgtgttccctcttctctgtggcagccttttcagactcccgtgtgttcccaaatcacctgaggaacttagtatgaaagtgactctctggacgcatagcagacctactcgttcagaacattcagaatctcccaatatggggcccagataggggtgttatagcaaggttttcctgtttattctgatgcatgccaaattttgattgtcactctcggattatgtcctgattcgtaatctaaagcagttgttcacaatattttccccagggaacatttgccaacattttttggagataatttttgctctctcaaatgggagcatgctattggcacctagtgagtagaggccaggaatctttccaaacatcctacaatccacgaacagcccctgataacaaatagttatcctggccaaggggaaccttcttaaagcatgtgaagagatgaggagatagtttattctttaaactaaatccagtattctctgtgtaaatgtgtttcttcacatcaataaccgtttagttttgagtctgaagtgaaaaaaaggaaacaaataacacgataaaaattgagaaactttctacatgtatagggttaggagatattaagctttccatgctaatattttttaaaatgttttattaaaagtaactctgtagtctactgtcccccagaatggactctaggaaatagctgagcaatctttactctaattgtggttcactgtcattgtatgaatggtttcaggtctctgatataataagcaagagattgaggctgggcacggtggctcacgcctgtaatcccagcactttgcgaggccaaggcaggtggatcatgtggtcaagagatcgagacaatcttggctaacatggtgaaaccccgtctctactaaaaatacaaaaattagctgggcatgctggcgtgcacttgcactcccagctactagggaggctgaggcaggagaatcacttgatcccaggaggcagaggttgcagtgagtcgagatcgcgccattgcactccagcctggtgacagagtgagactctgtctcaaaaaaaaaaaaaaaaaaaaaaaaaaaagcaacagattgagagtggtcatttacaaatttgtaccattagtcattgccagaatacctcagcttgatccgtacaagctgtgtgtccatggacaggttaattaacctctccaatctcagttcccttatctataaaatgaatgccaattcaggaactcaaatagcacacagattcttgcatctgtaaatgacaaaggagacgaatatatatatggaaccctgtctgttttatggggaagtctttttattgagaacttattatgcatctagctctgtgtttaagaatgtataaacattcctcctccatttttccctcagcctcattttttaaaatagcaaacctaagagaagacagtattttttaaattaattctgagaagctctacacatgtgcttgcttccaagacgtaaggagatttaaaccgaaacagtgggaaaaaaaattaaaaatctctgtgctgctgactttctggtgtcaggacaagagaagacattaggattttatatatgttgccattatcttacactggtaaaaagtgagatcttcagtaatgaatattagtattttgaacagctaagagactgaagaatctagacttataaggttcattaattaaattatccaacaaaatttctattattgatttacattattctagagtattggaaatacaaaaagagagaagaaaaagcccatgattggttcagtttctcatctgaggcaactaatcttttctctgaatacccacaaaagtaccagaagtaagatagtaacccaggtctgtaggttgtgaaagataagaaaagatagctttggattttgaaatatatatgtttaaattctgtgtatttttgtcagtgttgccattttcaaccttaggaaacaaaataataaacttttgttattcaaaatttataacactagatgaaagtaaaatcacaactttcaaatttttaaggttatagtatttctacttctgaagttattcaaacttaaatctgccctgagacttttggaacatggatattactgtttcaccctactggccagagtaatcaattgataatcaagtattgctcttgacagaagtagagaaaaagaaaagtactagaatgtactgaggtgtatccaaacaacctggtcacttaacctccccaaggatttcttcctacctgtgactttattttgacacttgactctaagtcatttttgaagtcatagcattgcctgttgtgtctttaatagaagcaataataaatgattctcatttttaattgttttaggctcacagaaaacctgggtacctgaaatacctaacattttatttattttaattaggcagaagctgcaattcatcccttgcaaaaatatgccacaggcaaaagctattaaaaatctctgtgactctgcacactctactcttgtttgtaaaggtggaccattacaaggcaatttgctacatgtggggtgaattgcaaggcacataacatttacaaatatgagcaattaaattgaaaaccactcatttctgttataatactcaaccatatgacattcaatctataaatactaaacttaaattatatttaaggtacaaccaaagtttaggatgaaggggcaattctctagaatgcaatttgaaagcaaaatttagaaaagtaaataagaaaacagacttgagaaaaaactatttattaagcacaatactctgcaatttaaagtagaaaatgtatttatagtttgcggtgtggacctcagtggatttcaaatgctctcagtgtaaacataaacagaagtcatatccttatgttttaaacaccagagtgtggagaagcaacttcaatctaaaaaaatcacaggaaattattcagtgcaactttcttggtatgggatagtcccttcaaagtaaaaggcatatttctctttgtatactggttactgttatttaataattttgataaattcaacaagtaaagtatcttgataactgacaaggaaaaataattcttactgaaaaactttatcccattcttcgcacctcatccccaatcatactggttgttagttccaagtctttttgttcatgcttttattttaatacaaaattatcctcctcgttaagatggttgcttgtattaccaaaactattgttggtaagatgaaaacagagatgccgggggtggaataaagcatctgcttccaagaatgacccttatcttatttgcacagtactctgcaaacatcacgatccccatgcagtccctgattgctctgtctttgcagagacgtttgttttacatgttgaaatatctgttgtgcgtgtttctctatttcctgtttgcaattaaggcaatctcaacagtgtccactttagaaatattacctctgccactctctcccacatcagacctgttaagcaactgttacaggaaattttaaaacactcagtttttacctgtatgataatggtaattacactgtgttataaataaatatttatttataaattattataaataattattaaaggtatatgaattaaaataaaaaactttctaaaattggaaaaatcttgaagatgaagattgtttatgtttattagaatcattagcagcctatcacaatagttgatgcttgaaaatttaggattaatgatgacatttttatttttttccttcgatgttgttgcattgcccaggcatttaacaaatacgcaaataggtgtctatgtagatagatgcacacatgtatatctgtctacatagacaactatttgcatatacacgtatatatgcatatacacgtataggtacacgcataatgagtaaatgcaaatatgtctatttgtgtttatgtaaaattatgtattaagtagtctttcttccatgctcgatatttcttttttgttcttgttaaatcagaacacctatagctagaagagaagaattgtaatgttgccaacacaaagaaaaaataaatgtttgaggtgatagacacctcaattgccctgatttgatcattacacattgtatacatgcgtcgaaatatcgcatataccctcacaatctgtacaactatgacatagcaatagaagatcttgaagaaattcagaatatctagcttctgcttggtctttgaatggacttcacaaaagaaatcaaaagtatggttggaacttattttttaaatattaaataaattttagaaatgtaccatactgcacataaaaattgagtattcacctagatgagcatatgaattattatttttctgctggtgaacaaatttattcagtaggatgagatgtgtgggaaattgccattcactataaaattaatgaaacagaaaaaatttccttttacaatctaatgcttttttaacttaacacagacattgagattcaagtttttattaagtgcagcttgatcaaatttcagcatgcatacatcactattgttcatcaataactgaagaagattttgttgactacatttttatcagatatttcatgtgaacatgaaaacagaaagaatgagtgtgggttgatataatgcctcgggagggtgccaggcttttcgttctcataagcacgtattttcagatgctttgagaaggttaaacgattttgaaaacttcattataatttggatttcagaaagcctatcctagaaataaacgtttcaattaaatcttcttaaaccttatggtaaaagagtttaaagtcccctaccttatgattgtagaaattaaaatcatcttataggtgggctatgaagagaaaatttttattagatgtagtcaaaaaagtagaattttttacatgaataaaaataattaagatttgttatgtttttagtttgtatgggagtatgtatgtgttcccttgggcttaatttttaagattaatatttttacaaaagattacatttttttcttatatgggacttatcacaaaattaaagctgaagaatagagacatgatttgtttaccatatgcaagcatttggatatttgttctaaaatggaaatacattttacagaattcttaaggtagcatgaaagctaagtttatgcaaaagaaaaataacaggttctagtggctcgtaagaaatgtttggtatttcagagatattccaaaaaagtgaatcaagggttcaacttgttccttcaccatcatatagggcatggtcctattcttcatctttgagtatcagcatagccatattttaattccaggccacaacaagacaaagagagaatggaagacctcacacataatgctttaaagttaaagcctgcaagtgttacacattatttctgcccgcccccagttggcctgagctaatttacgtgactgttcatgactgcaaggaaagttgtgaagcacagtctccggcgatgtcagttcaaactctggtgggaggttcattgattaaaaggaggaaacagagaatacatggtgggagatgggaagatgtatctgtcacccagatgtctggcaaaggttttgttattttaatctcgtggaagaggctaaagaataacagaatgagttgaattcagaatgttataatttgtgctacaatcagttgtctaaaaagctatgtttatacctatgcctatttcttttgtgacttaaatcttggaggccagccatatttagttatttttgtaaaagttaccaaattacaatattaggcacatttttcaaaatgatgctctcgtcttcttattatgcttgggtcgtttataatatattgaggttttgcaaaaacaaactgatgtaagatacagtatgcattatcttacatcatacatacatacatacatacatatgaaaaggagagagagagagagagacagtaatagagatatctatgaaattggaatcaggttaaacatatttcaactgaccctaaattccttaaaaatatttctttgtaggtattctgatttaaaccactagtttaatgaaatgcaaccactaattagggttactctgtgttattcttacagtgattcattcttctaagttccaaactcctcaagatatttgtgtgtctatgtattttttctctgtaagagacaattttgggtattcttaattaaaagcagccactgtcacagtaagaataaacactatcagaatgttggggagggaggagagagagagtgtgaagatgctggagcttgaagaagggcttatgattgtgatctgaagaacaagctctaagacctaagacaggtggaagggactcgggaccataatgaaaccccctgagccaaacccatgagaaatgatggaagtggtaagaagaaaaaaaaaaaaaggaaaagaaagaaagaaagaaagaaagaaggaagaaaaatatagacagtgggtttcagaataagtaggagtctgcaactgacaatgaaaagtaacaatttttttcacaatcattcaaagcaaatccaaactatttacgatgctttttgctacgacagaaagcccttctcaaactaacttaaatcataaggaactttttaatgcagatgtgtgtgctggaatatttttgagattaaaaactgatttattttcatgcctctagctctatttccctgattctccccaagtgcccacttcatcttcaggtggtaacaaaacgataacacctcttaacattttcacagagggctagagggagaaaatgtccagaggagaataagaagaaaaaaaccttcctaaagtctccagtaaatacctttacaatccactgtcacgtattggaccacaggctcattttttacccaaacatgacaaatagtgaccttacatcccagtttgcccaaaagtgttgttacctattactctgttgtaattaaatagtaccttctttcactttcaaaactgacccagtttaaataataaattatgtcactattccaactaacatcaatctggtcaaaccctgaaatgtgagatgtgatcagccattttgggggcacatgtgcaagatgaagaagggatagagctgaatgaaatcaaggttctttatgaagaaaaagaagatgtctctaacaatcagaaatgtcatacatggaatcttttcctgaatttcctcccaaattcaaatgttgaagcctgacctccaatgtgactgtattttgaaatagggcctataaggatgtaataagagttaagtgaggtcatgaaggtaagatcttaatcccatcggagtggtgtctttataagcaaagaaagagagtctaagtgtttttctctctccttgtttgcagagaagagactacgcaaggacatagtgagagggcagccatctgcgagccacaaacagaggcctcaccagaaaccaaccctgcaggcaccttgatcttggacttccagcttgcagactgtgagaatatacatttctgttgggtaagccatccagtctgtagtactttattatgacagcccttatcagactactacatagagtattcgggcatttgtaggcacttacctgccatgctggctagtttcaattgcgagtgcttgggagaaacatgagctttacttttcttttcttttttttttttttcactccatctgcctctgtgtttagaattctctgtttttctaattatggagctaacctctcaactccttgaatgaagaggctgaatgccacacagtccccgggcttttaaaatgccatatgctatgtgtatattcttggataattgtgaaccactttagacttcccctatgccccacttatgggttgactgatgtgtggtaacttgaatgggctcaatataaaatctctctggcttgtacaaggaaaaaacagagaaaacagagaaccttttaataaaagatgaaagaatgttgaagagggcttaaaagggaaggattcaatcagaattatagtaaacttcatggtccaaatttgagagaaaggtgatttttaagcctaaccccagcttggattttcctcgtgtttgttctaatgtacctacttctactcacttttttctctcctaattgaaaaggctttttgatggaaaagatcatttttcatatgctgtctttgtccttaaataaacagagaacctcaggttaaatccccttagagctatgttagatttgctttccatcaagtttgttattaaggcatatttaccaagatagagagtacctgatctaggcactcattttaaatttaatgtacaagttctggaaaatgcagggccagaacgggtggaagatatcctgggtgtacatatttcggctgggctgatattgtcaccaccaaattgttcgggctgcagaaacatttgtttacatatcactatagaggatgcaaaattgcattttttaaacatgttcaggagaatctgggagagcaacatgtaagttaacgagtaatttttgcattaaaacataaatattaacactaagtatgcacagttcaagtcagctttttcttccgaaagagctaaggtcgggcacaatttgcagctctttgaattgcaaaagaagctttcgtttttctgagagttttggatttcagaattggataaggggttatagatctgcaatatcttcaccaccgagatttatgaggaagaaactgagacagagagtaaagtaacatacttacagctggtacccaaggaaggcatgattcaaatccctgcagtgcagattcattatgccatctcagtgaattgaataatgaagcaagagaaagtctctctttgatggggtgaggaatatgtcttggaggaggtggcatttgagctttactctgttcgatttttacaagtgttttagttactctatgctttttctcaccaagtaaatttaacaggtttagtaaaggcatgaaggaaagaaattcaaaggtgacctgtgaatgagtttaactgggatagttggaaataggacctaaaaagaaaagggagccaaatcttggattagtgcttggaaattcaaatactattctgaagtaacaggaacataattgaatgatgaaatggtatagtcagagttgcaggaggttaatgagataacaatacatgaggagagagaatggtagtgattaattgaaatgccctcacaatatgtaacttccataactaaagcaaaataattactgcccttcaccatgctctgtaggtcattgcaaaattcacatgaacttttgttcctacgtttcttttaacaaaacaaatttgaactaggtccatgaatattaacatatgacatggtcctgttctcaccacagttgagtccaacctgtggctcaggtagtattagagacacaatatgtacttctggaaatttgtaagttcaaaactaacttgagagatatttttaatagaatactagtcaacatttggtatttagttaatactttgatgagtttaaagattcactataaaagactttagaaatggcaatattaagaagaaatattttgagatacatggttatctcacactgttccaagttgtaattctataatataaacacaacctactacattgagccaagggtcctatctaaagatatcacttatcgagtgagtataatgcattgaggtaactgaaaatggaatgttcctataagagaagaagggaggagaaagtaatataattaaatagaaaatatcctttctcaatgtgttgaaataaatcaacattgactacagaaagggaatcaacaaaataagatgtcaaaatctataataaaatatcaaaaatatagaagtaaatagaaacatgttagctgtaggttaaaagttactgttgcttctgttatcagtatataagagaattaactacaatagcactcaaatgacacgaggattattaaaattctgtcaaattccctattacgaagctcatagtttcatactcagccatataacttgcctcacagctgaaatttagggcacagctgaagaataagaaatttcactttctaaatggataccttggataaaaatgtacactctctatgtatgtaggtgtgtgtatctatgtatatgtatgtgtatttctatacacacatatacatataaatttgaaataaaaataattattttaatataaagttttcaaaagttaatttgttgtcaacactttagaaagtttagtctgttactcactagtcaacactttgtttatgagctactgattctcattttttgtgttttttttaacttttaatttaagttcgggggtacatatgtaggtttgttatataggtaaactcatatcacagaggttagttgtagagattatttcatcacccaagtactaagcctagtacccaatatttattttttctgctccttgccctcctcccatcctgcaccctcaagtagtccctattgtctattgtgtccatgagttttcatcatttagctcccacttataagtgagaacatgtggtgtttgcttttccattcctgcattagtttactaagaataatagcctccagctctattcatgttccttcaaaagacatgatctcattcttttttatggctgcatagtattccatggtgtatatatattttttctttatccaatctgttttctttatccaatctgtcattgattggcatataggttgattccatgtctttgctattgtgcatagtgttgcagttaacattcatgcacatgtgtctttgtggtagaataatttatattcctcagggcatatactcagtaatgggattgctggattgaatggtagttttgttttcagcgatttgaggaatcaccatactgttttccacaatggttgaactactttatcctctcaccagcaatgtttaagtcttcccttttctctgaaaccttgccagcatctgttatttttcactctttaatagtagctgttctactggtgcaagatggtatctttatgtggctttgatttgcatttctctaataataagtgatgttgagcttttcttcatattcttgttggctgcatgcatgtcttctttagaaaagtgactgttcattttctttgtgcactttttaatggggttgtttttcttgtaaatttgtttaagtttcttatagatgctagatattagacctttgtcagatgcatagtttgccaatatattttctcccattttgtaggttgtctatttactctgctgatagtttcttttgctgtgcagaagctcttgagtttaattagatcccatttgtcaatttttgcttttgttcatttttttgtttttcaccagaacactctcttttcagtggtgtcactttccttaaacattatatttacagaaatttatcgtacatggtttatagtcatgcttttaccaagttttctatttacttattactgtttcacttttcccatcaactctaaagggcatttttgagtttaaatatttaattgcgggtattttctaatgttttaaagtgaagatcatccacaaagactgactacaacagaccttggactaatccaccatcagtcatgcttatgtgtaagtcattgaaaaaaattcttagtcccaattttatcttcatttgtgtacttttcattattgtcctttgttttactgattttttttaaaaaaaagtaaaacaagtaatgcatagaaaattaaaaatataaactttagtggtaaaattgatatgggtaaaacaagaaaaaggaagaacatgctgagcaggttttcctggacacttttacgtttattgtatgtcccagcctctacaacagggatgttggaagaagcaagagacttttctatgcaacattcttacagaaatcatgttttgcaaagttaagctacttgattatgttgaaattcaagtactggctaaatataattcccagatgagcatacttatgcatatcatccattattaacttctgtacaatattaaatataaactacttccaggcagcctggcatgaattaaaaatatgaatgccaccatattattgattattgttctacatggttacactttaatatgcatagtaatgcaaaataaatatgctaagagttcttcaataataaacatgccattcctctgaaaatgctaggatatatatgcagtacaaaattcatacactatgtaaactcttaaatgaaagagttcgtaaaacggtctactatttcaaatatagttctctatcacaacatattcaaattattaggtgttttctctgtggagtattttcaatattttacagatgttggaataatcgtgagatttctgtaatacagaatgcgttccattgttattattaataatagtctctactataaatcacatcaatcactgtgtgagcattttgcacatgtaatctcaaattctcatagagaaatactgttggctacacagactcagtaatttcaatcatgatactattgttttaaacccatcaatatgctaatccattctgccaggtgcaagagaaaccaaagagtaataaagtaatttcagagccttctgacctcaaaaagactatcattcaactaaggagatagattacaaacaaacaagatgccaactaattcaaggcttctctatcatgagtgaaatattttcatagtctgctacctaatagtttcactcttaattgccaaaaaaaaaattacttgatccgtatgggtgtgtgtgaattcatacacaaacttaaaaaataattacatttattatcttattagaatcaatagatggaactacattaatctaaaagaaaaatgagaatttcatcagaatcaatatcaaagttaaattaatctttctttaataaaacaaggcacaagcattcagagtttataattggagttgctaggctaaagaattactatagggaaggaataatttctaaatacaaccatctttatttccagtcagaaagcaatgactatttccaagctacattgggctgaatttcctgctaacaaatgtgataatatagaactctatgaaaattaatgttccaatgagagctcctaaaatgatgtcctcaaaaaataatattggtgcattaaaataaagaattacacattaagttcaaagttaaaactctcatagcattagtgcaaaaataggctgggatgtatttacttaattttttccttttaaacactttttaaagtgttagagatgtttatagaaattaatctacacaaagatgaagaatgtagtgaggctcatttagtagaaactttcagaggtatttcaagcaaatacaatgaagaatttcagaaatagtattaaattactattattgatacaagacaacccttttcactgtcattcattctatagtaagtttcttgatgagagtttcatgccactatggtactcagtttgattatacctgagccatcatgtgtcaaattacttttgtgtctcagaaaccaacctcccttcctccctccttccttccttctttctttccttccttcctttctccctctctgtccccctttctttttttcattctttctgcttttatttagactttgaggccctattaggtgtcgtaaagaacattctgtgcagtttggaaatgagccaactgtgaaaaacacatatcttgccactacccttactataccactaccaacatgtatgcacatacttctgtccaggttgatcctgctttaggatcatatttgaataaaagaaaatgaatataaattagtgaacaacttgtgttaagtatatcagttgtgtttattatgcaagtatgtacaagtagggtaggtggagaacatgttgaggtggagcctaataatcagcagcatcatgagctgcatagttatggttccacctctactcaagggtccgtatttaggctccatgcactggcatgactgtgttctgaatgacccatgcccattctgaatgagtaatgttcattttgattggatgatgccttgctttacaagttgttaaatattttgaaatatcaccccctcctctgctaggtgatattgggcaaaccaattatctctcaacctcagtttttcaactgtgaaatgacatttgaactgtagagtctccaaagtctctttcagtcattacgatctatcatttagggcttaagtacacacagcaaataggagtaatggtgcagaatgaggatgtcagagagtaaagttttcagaatattctaataaaactagtagtttaggaaggtacaatatcaactcttttttttatgggagagtttttatttattttttatttacaacttttatttcaagttcaggggtacatgtgcagatgtgcaggtttgttacataaacgtgtgccatggtgattagttccacagattttcccatcatctaggtattaagcccagcatccattagctatttttcctcatacaacatcaacacttaaactagcaattgagaggagatgttgcagggtcttctggagattatcttctcaattagttgacttgggtctacatggagctgggatttctctggttttgtaaaactaagcctaaagaatatgaaaactgatgctaaatatgctctaattctacaaacttgccaagcaaattctgctttcttgaaacagagctgcatagctggaaatttccaaaataatgtctacattttcaatttaattgttttccttaaataaaagggtggaaattgacttcaactggtttaattgatatggtacatgtaaaaacactttagtaataatataagtacactaagcaaacattagtaaggtattgttagctgccatagtatgctatcattcttggctcataaatatatggtgtatcacatctactatattacaggcattgagttacctcttgaggacacaaataaactacttgcactcatatctttttctcagaatctgcttctgggaaatcccaacataaattaatatgtgtgcatgcatgcacgtgcacacacacacacacacacacgtgtacatgctaatacattgagggacagtgtatgacagtaagacattatgggcagctggaacaccatgtacaaaagcatataagtgacaaatagagagatgagttattggaagatgtaatgttttacagaaaaactagagaatacaacatatacagggaatgctaagagaacattctgtgttggatgatatgagcaagaacttaaatggatttgtatagctcattaaaagtattttataatttctcatgaagggcattggaaacccactgagaaagcattttccaatcaaagggactagcttaggtacaaatcctattgcttaaagaagttttatatattattttaaaataacagagagatctaaataggttaatgggaagatgttagatgagcaatgtatggataccacagttattataattgtttaatattcatttttttgggtttattaacacatatccgttaccagtgggggaaaaaacctaaacttttgctctttcttctcttcttaaaatcctgctacaccactgccatggaatccccgtctaagtcaatagcagctccatgcatccagctgctggggataagaaacctgaagttatcatttatgtctctcttttacactccatctataacctcccagaaaattttattctttctactttcaaaatgtagcagaatttaattgtttcttgctgcttgcactgactcagcctgtttcaatctccagtattcctctgtctgtgtacaagggaatggtggcttggaccagtaactttggaggccgaggacaatcgcttgaggccaggagttcaagaccagcctgggtaacacagcaagacccagacttcgtctctaaaagactaaattaaaaataaattatttttaacaagttccccagctgctacccatgcctttcagtcactcgtcaacacactgaaatgaaacctgaagtcacgataacatcatagttgacttaatttgtttttattgaagcagagcgctttctccaattttacttttctttacacccaactgaagttttcttaagctgttcaattcttttaaacacctagcatattagatattgcttaaaagttaatgttatatgctccttttctcaaaacccatgaatcattccccactttactcagtaaaagccaaaatcattacaattacctacaacgccctctgtttctttttatcttcattcctgctattctcactccatcccagccacatgggcctccttgcttctgtttgaacagacatctcccaatgttaaggtcttctgagatgatccccatggtggggtccataatattctcttggctaagctctgatgatgttctcttggctaattttttttttccccgtgatgttctcttggctaagccctgactgttcttcacgtttatgtttaaatatcattttttatataagtattttggagtaagacttaaatgacagaaaatcaacacattgatttttttaaataactctcagtattattctccttgggggatcattgtgttgtaattatgctttcatgttcttttattaaagatacctatggagaactttatccttcccttcataagcctgccatatttttcagtcaatctttgatagatctttaactgatcattaccattattagaaataagtatagatctgggatataaaatgactagggaaggattaaaagaacaccgactcccaattttaaacataccagcatatttttttcctttaaaaaccacacatgatgtttttggattaaaataaatgtattttaataccattttatggagggacctctaggaatgtacaaacaagtttagaatctgggggcttaacaagatatatgattaggtatagccatgtaagactaccattaaactctactcattatttatttttaatttaataagcaaactaaaaactcactgtccaactagtcatagttttttatcattttatttatgattaagtcataaaacacttaacgtatatcaagacttgaatttggtttattaatagattaaattgatgtaaccgaacactgcactcgaattaacttagttccaataaccataaacttggcctgcgtgatttcatttgtaaccattttttaccttgttaactcagtgtcctctcactaatgtggatcaatggcaatgtacgggcatattacctttataaattcacgtattttttcaatgtagtaactgtttggtaatttctgttaacactttctcctttctttaaatggaattagagaaatgtcgaatagaactcctttatgtaagcatatcttcgagggcaatatacaagatagtaggaaaatatcctaaccctacttggatgcccaatgctaatgtcaatctctgtcatcacagtcttgtgggataattgttcataactttccactgcatcactgagataggctcatgtcgatttataccagctggtattccatggctgtgggctagccaccatctttcacacctcattgagttcccatcagactgtaaagtacagtaactaagtaatctcttgctcgctctcctttttgttaatgtgttgcacactctgccagtgtaaagatgtatatgaactggggttttctctagaaatcaagaaagaacatcccactgctcacaccagctaaaccacactgtaagcaattgcttgtctcctaattataactataaaacaatattggatacactgggttttaaatgtctagcccaaattcatatatctacttagttttgaaaaattactaggacagagctggcacttaaatgtttttgaacaataccataataccataaagatattcttaagctgagattttctttttcttaaatgaagcagtaagcaaaaatctcagtgtaccatgtaaaatgaattaattttagcatggtcctttgagtctattttaaatattatatccatttataaatgggctgctgagctgatgggaaaataagaaatggcctcccaggcattcagaaataaaaccaagaataaaactcagtagctttggttgaaaaataagatgtagtacctcaaaataatttcaaaatttagtatgagaaaaaaattgtttagaagattttgaatgaaacatgcaaaattggtctttggagttgttacgaacctatattatgagtaaacttacaataaggatatagcagatatactattacctggactttttctccataatcttactctcacacccttaaatctctaaggctgacatttctggagggaggattcatgaatatcctgcagaagcaagaatacagaagaaagattacctactttcaacacaacactaatagacttttgacattctgtttccaatcctccaggcaccctccactcccaatttctctgctcataatgtcttcattccaaaattaagttgatacttccccaattcccttcccactttttacctaattatctacctataaaaatatgttggaacaacaaaatatagctacaagggaagcacatacacatatacagacacacactcactccaacacccttaggtaaaacaaacaacatttagagaaactatgttattctcttaggttttaaaagtaaaatgaaaatctctgttggtttgattttgttttcctgagagttttccagagtggttagcacatcgttcgcatttaggaatcaatattatttatgttattggaatcatactaaacggcagacattgaagatgccatagtcagtaatggaataccaaatataatatcctgtcaaatagtcctcagggaactgatggtcacaagatagtctactcaatttttatttctttattattattattattattattattattattattaagagaccaggtctcgctcggttgtccagattggagtgcagaggtgcaattacagctcactgcagctttgacctccttggctcaagtgatcctcccgcctcagcctcctgagtagctgggactacaggcacaaatccatgcccggctaatttttaatttttagtagagatgaggtctcgttatgttgcccaggctgatctggaactcctgagctcaagcaatcctcccatctcagcctcccaaagtgctgggttgacaggcatgagcctctgcactcagtccatgttaattttccatttgcagaacatttttcttccaaatcaaaaatgagtattattatcttccacctacccatatagtaatatttgtgccttaatgaaacatccaaaacaagattttgtctgaaaaatgtgttcaaatatttgaaatgtactattatttcttatattaacattttcttttaagctggtattcacaattcagtgaactattttcatgaaatgtttccctctgagttcagtaaattagtgaaccctaatgccatgtttaatctttattgccaaatagtttttcctctctgtacagtatctagaactatgataattattttattacttatttattgtctcatttcatacattgaagtaagttccctgcaaaatcataatcatctactgtcttcatgattgactccctagtatatacaacaattcttggcgcatagtagatattcaagaaatagcagtgaaattaatgaataaacagatgtattgtgtagctccaaatgatctcatgtcactgtacacttaatataaagctcttatttgatatgtgatactgagccacaagacgatagtgaattattttaaaccacttagatagtctgcagccaggtttgtactaaaatgcaagccagttaactgattccagtgcttcttgcctttttcctacacagcctctcccctgataaccagaacctgcataatctcagttaaaatatgacatgtataattagatatgattccatatatcatttcatgcagcctgaaataataatcactgctatgattgcaatattttgtatatagtcttctaaaattttgtcaaatttcttttagcaatttatgttcctgttgccacatacttgtgactagcaaacactccacgatttttaacatcatttggagtttgtgcattttcacacttcatttatccccattaagatgatagttattagtttcaacccatgtttccaggttcttgagataattctaaatcttgattctgacatctatgatattaagcagcaatttcagatttgtgttaagcacaaacttgaataaaatgcatctttgcttaaggatgcaaaacaaagtcttgagggctaaattagatctacatgagcattttcattagccagtataggctttttaaaaaaatatatatgaaggtgtattaatttcctggggttgtcataaaaaagtaccaaaagccaggtggcttaaaataacagaaatttatttgctcacagtgtgcaggctagaagtctgaaatcaaggtcccagcagggccatgatcaatctgactgctcttgggggaaattcttccttgccactcttagcttctgctgtttatctgcaatccttgccttctcttagttcgtagatacattagtccacttacatggccatcatcttctccctgtgtggcttcaagtcattttccctctgtgtgtgtcatctcttgtcccagttttccctttttataaggatactagtcatattggattggggctcactttaatgatctcatcttaacatgattatctctgtaaagaccttatttccaaataagatcacattctgagatattcagcattaggatattataggtagcaaagacactattcaaccccagaccaaaagcatttggattagtgatttctgcgcaaagtggtagatatattataatactgataatattatatgtaatgtgtcatatatatcatatatgtcatacatacatacctgttctaaatgcatgatgtccatatatatgcacacatatatgacaagtttgtgtgtgtgtgtgtgtgtgttagtgcaaagttttaaactttctagtctccataaaattcttcttgctttggcaaaagccatcggttggtaatttaaggtagttactcaggacatagtatcttatctgatcaacattttttttttttttgagatgaagtctcactctgttgcccaggctggagtgcagtggtgcgatcttggctcactgcaacctctgcctcctgggttcaagcgattctcctgcctcagcctcccgagtagctgggactacaggtgcgcgccaccatgccaagctaatctttgtacttttagtagagacgggatttcaccatgttggccaggatgctctcaatcttttgaccttgtgatccgcctgcctcggcctcccaaaatgctgggattacaggcgtgagccatcgcgcctggccttgatcaatttatttttgaactcagtctatgtgacttcactttatatatcataatatcacaaatcctaatgcttcttttcagtcttgtagcagattttaaagtggggcaaaaagaggaatccattaccatcacaatgctggagtactgatgtgacataatgtctagtaatgtttttatagatccaatagcatccaacagaaaacacaattttgtttgcatgactcaacttgagagaaaataattcatacattagtgtgactgaatccagatattttccagttaaaataagtcatttatcattttacttatttatagcttaatattggaaaaagcagagagcattaacttgcatatatgtctcagttaaaaatatagtagaaaacagcatattcgattaagaccttgctattcctcttaccaatggtacacatgggaaaacactggaaaatggagcatcaagtcctaaatcttttaagcagaataatatatttgtctaataaatctgtgaaaagtattttaaataacatatgggttaccatgggatttactgtgataggttagaagataataatatatagtggaagtcctacttgctagaaacttagtttaaattccaaacatatttacttacctcatatctattaaaatcaaagtgccaatctgttattcccactcctggcaggtggttctctgtcacattgttcaacagcaacatctactggctgcaatgtccacatctaacttctgttgcttggatttctactgtttggtatgtttcaaatgttattccagggagtggtttgaataggaaggttggattacattgggagaaagaagagatcatcaaaagttcttgaaagcagatttctttaataatttaatttttattaggtacttagagaaaacaaaatctatccattcagggtttccagagtctcattgcttgagccatacatggaaaccagcttgtggatagttgtacatcagaaaaccatttatgattactgtctcagagtagctaccttactgagagatatgaaacatagctatacatggaaggaacaacagactttatagaaatgattaaaatcaaaatatactctatcatataaatttgtatttaaaggatatactttactatttaatggtgattatcacaatgagcacaagatttgggggaattactcataactttattctttttcattattttcagcatattaactttgagttccaaacataaactatacaaattatctaaaaatatacttggtaccttttgatatggtacctctccatgtacagaatgactgcactgccctctgatttgtattccctgccaacactcttatataatcaatagctttaaaaattttcaatttggatattcagctcgttagattccaaccttctgcttcattgacattcttcaataatgaactttcatttcttttaggcaggatgaaatgaacttggcatatgactttagctttaaaaaattgtatttaaggagaataaacataagcatttaatattctggagtttcttactaccacagtgtaattttcataccacacatatataaggttttccttttctacttctaccaagttatcatatagttagttacttctgatggttttaagaaaaagttatagcaatagatattactggaaaagttatttaattcacaagtgatcactggtttactcatttatgcattttaatgtacaaattcttttttcagaaatagagacacaggtctcactttgttgcccaggctggtttcaaactcctgggctccagcaatcctcctctcttggcctcccaaagtgctgggattacaggcatgagccactgagaccggccaagaaaattcttacataccatgttttgggtcaggtgctgccctactaggccaaaatattaattcatttaattatctaaaaactctagaatccctggaataattcagattaattttgctcagcaaatattccctccctcctccacccattgtgaatgagaatatgatccagtatatgatcccacccaactgaaactgggcttgaatttaagacttgctttggcaagtacaacacattgaccagaaaagagatcttcagtgtgcttgcatgttttggcttacttcttaggcttttatgatatatcagtcactgtccctgtttgggttccagaataaacaaataaagacctggtcccaacctctaagtacagagcctggccacgcagagacttccagccaaacccatcctaggtcaactaaaccttgtgtagaatttcactaaatataacgttaatggtgcttcctggtcatttggcctcaatattatagtgaaacagcaagcacaaaaaaagttatcattcttacaggtacaattgactctgattatcaagagaacagtgagtcattgtgacacaataggtgcaggagagaggattgttggaactgaggtgattctctggtaaccttggcatgtctatgtctggtaaaaataataagaaatcatagtctgacaagggcatggtaaccaagttctcaattccttgagaatgaaagtctgggttgtcttatgagatgagcaacccagacctgatcaaatatagaggaagaatatattgagtattattgatagccttagtaccagtttcagccatggttactacagataggcctgctactactcctttcacttttttcccccttaaaaattatgccttaccactctcacaaagaagcattgtcagcacagagagaatatgttgtgagacacgagtggatataagggggggtataagtgatgaacttgtcagcgccctagcattagtgtgggatattcattacagttgatgaaccaatattgatatattattagttaataataaagaattattatttgttataattattagctattaatgattagttaataatgtatcaatattggtttatcaattgtaataaatacagtttatagtttacattaaggtccaatctttgtgttgtatagtctatggatcttgacaaatgtatcctgcatacatccaccattacagtattatacagaatagtttcactgccctaaaaatctcccttgctctgactgttcaattctgtccactgaacccttggcaactactgattgttttgctatatctttacttgtgcgttttccagaatgccatattgttgggcccaccatttccttatttttagctgctaaggttgctatcacaatgagttcagggactcgagtggtgacaccatttatcctgggttgtagagttggctcctcatggcacgtctttggaggcttggtatgagccgctgtagaaaactgggaaaatctttcttttatctctagcaagtaagttatttataacttattaactcgttttataaatctttaatatttcaactgcagttaacaacctgagcagcttgcctccatgaaaacaaatattgaacatatataaaatatgtgtgcgtgtgtatctacaaatctactcaaaattataagtagaaaaaaattacaattaagagtcatcgggaataggaataggatccactatacataaacaaatcaggcctttagaattgctgcaaatactgctttgaaatttattcttttcataaatatgtaagttaaatttattcttttcataaataagtaaattaaatattacgattataatatttttcctaaaatacatgtttcatcaatatttcctgagggtgttctccaatataccctgtagctacccagctgaaatggccatggtcatcctgctacgtgtaaagtactttaagtggtcttatgttgtgctactttaaaacataattattacttttattgttactttaccttcacatttggaaaaatacaaccaacaaatcctgtacctctgtctagtttattttcattagtattataaccacaagcaaaggaaacagatgtttttatcacaaaaacattttgtaaatatgcaagaccaagaaagcaacaataagcatgttgtgcagttagtaccattttctctgatccactaaagtcagttgtccaagaaaggagctgtttatactactcctatattgctagggcagttgcagactgatgacttatgatcaagaaaaattaattttctcttgtaatactgaaatcctcaaaagcatgagttttgtatcgatgcctgaatttctgaagtcatatttttgaaataacatgtaatatgtaatttgaattcagttactccaaacattattatcagttattttccaagaaaaatacatacattgcatttgatattgcctaatttctgaaattggttgagtctaaaataataacgtcaaatatgattttctaacaaacatgtaaaattagccgcaagctatatgaacaatttcatacgctataatcttattaggggaaaaagttttgtctatatccttttgattgcctttggataacaattatatgttagaaggcaaggtctaaggttagcaaggtataagttaataataaaaaattgtgatgtaataatttgaataaaaatttaaaaagtatgaaaattagccatttttggtacaatctatacttcactttgtgaaaaaaatccacatccatcatatgcaatacttttacacacaatgtaccaaccagcaatcagtgaagaaatatgccatctctttatgtatattactaattttcctgaaaactaaacccctttcagattataaatttcatagtctacaaatttatattgttaaatacacttaatattttcttaggaaaattcttataaatacaactatcatccaaaatttgattgtatatttaaatatttggttcacatggcgaagaatctttccataaaatctttagcaattgagagctttccagagatctaaagactcctgattcctccacaaatatactgatatttagcattattattcttcaattagattccaacttaagagataaacacatattttacatttagttcaatcatattttctttgattagaatttgcatccatatattctgtatatgactatacttgtctatctatgtatttatgcatctatcaatctatcatctatcatctctctagtcttcattgcaaagtgcatgataatatttcccacccacttgtatcttccactgcttttatttactattgatttaaataaactcttgcattagtgattaaaactttgtatgtcataaatgtgtctctttttttctcaatttttagttaccttttaattttgcttattgattattatttaacgctcaaagttaaaatatttgtttggctaaatcagtcaaccttttcctttatagtttttgtgtttggtggtaaagatgaattttaaagcaaaagtttttcttttcgataaactttcattaagcacttaccgtagcttaggaacacagagaatcaattaagtgcttgtccggcatgcaatttcaaccaagttgtggagatagaaatgcaaatgtacattcacacaacattaagaaatattttatcaacagcaatctaccaataaatgcaaattgatatggtgcaaattgagaacatatgtgctgagaataaaggaatgtgtaattgaatggaacttctcaagggagggaaattagagataataaaaatccaaggctttcagaatttttatgacatctttttgtcagtgattcttctatgcatctatgaattattctactttgcatatatttgaagaagctggatcttgctatatacattttacatatttcttctaggacaagaggagttgaagttgatatgttataaatgcttaagcataaatgcaattttcagcattatttttctgggaaattgaaagtgagacaggaatggttaggaaataagaattaattattttctttactagccatgaatgcactctacaccttcaaatccagctatgccttaccaccctgttgtcacctagtacttttgaagtttcatttcagaagtaaaggtataataagagagaaaattatggaagtggtgatagtattgtgaggttatcaaaggaataacaaccacaaaataaggaaatagaactgctcattttcactttcaaatatatacctaataatctagttattattggaagtttgatgctcattttgagtacgaatttaaaaacctcagttttggagaaatatgttagtgaaattttctcaatacttcgtagttaaaacttgattttgttctaatgccttaaaatgacttcctgggagctgtttctgctctctctctctctctctctctctgcagttgtcctcaacactcatcactgatataaaatgaaaaaaggaagaagtgatgacattgtaaccatggttttccctatagttcctgtgtctgctgtgcattttaccttctaattttcctagagttggattttaaatgatccagttctaaagcacaattttcactagtacttgaaatatctctcttgaatacttaacttccatattactctgatgagcaagacaggccatgttagggaaaaccctcaagtgaattcatgttcctttcttaaaccaaaaaaattcaaatcacgtttcccttccttgggagtgaatctactccatactaaggtacgtgcaaagcagaacttttcaagataaaaatgtattcagaacccataaaactatttttttatatttatatcttttcttctttctcaaagttcatggtctacagttttttttctcctcttccccaaacatacaatgaaaaagtgaaaaaagacttttgtaactatgaggttgcaaattcactgaagaaccaagtcattattcatttcagcatgtctctttcgtgatgactaatgtatgcaattccatcattaccaataaacattggtcccatgttgaattttagttttttataagatagtatgcaacagtaaaacaattctcagttaaggaaacagaagactaacattctgagaaatgaaaataaataaattttaagaaaaaccttctaatttttgaaagtaatgttagtgcaggatctgtgtatgaagttatagaataaacaacactggaattgttatatagggtagtatacaaatatatagcccttaggaaaaaaaaatattcttgctcttggctcctgctgactaaacactatttgccattttggtcttatttctggtaactaaactcttgaaatcaatggtccatttaattttaactcttttctgtttctgaaaaaccctacacctgcccacctacactgtgttctacctagcacacttttttgtttccctttaattatttagttcctgcttaacctattagtttggtatttcaggatcttgagccttcgaatctgggtccgttcccattcccattgcaccctctggtggccatctccatatccatcttagttaattaagccaattttgattaattccatactcttacactggtggcaggttggttcagaaaaaggcaactgatgcgattctaaccagtagaaccagaagtaaattctacaggaagccgcctaaggaaagttttcttattcacaaaatagagtcacaggaaactgtagtatctcctctattttccaaaatgcactattattatcactgttgctgctgctgttgatgttgtttaattttgttttgtttgacatagttctgcatctgctattaccatagttataacagcttaacattaaaatttttttaaatggaaaacagagacatgagaagaaagtctgtttctgttcgctttgtgacatcaatgaatcagccggtgttagaggtcaacttcagcagtcattttacatttattttgtccatccagaatgtgaattgccttctatgtttgcagacacttccgcttcttgaaaaacagcctgaaactcgttatgaaatctgaaatgccttatattcactttcctacccctccttgtgttggaagacatttccccatggatttcttgcattcctacatagtctgagtactctgagtaaaagcatttacggccaatcattgtatatggaaacattccaaaacagtaaagtatatttttttggaggattttttttacatctcaggataacaaacatagaaaatcctttcccttctcccccaaagatatttgcttatattctagattaaaccgaatattccagtctctctttttctctttggaggggaggatcggcaagacatcaggggccctacctaaaatcagagtttcctaattttgaggatttttttcctgtgatgtattccactgaatgtacacataacatctggctctcattgtgttgccctgtgtgaactgatgtacagagaaccaacataagataaatggtctttgtttctgactaaggagtcatctgtattatattagcctgctaaggttatatattcaacaaagcagaacggattcagcatggcagcgtggtctgtgttttctgtggcagactgacttggtagtttacaatagagtaaaatcacagatcttttacagtcttagttagacttcatacttagaaccagtgtattgtcacatgactttgaattcaacaattggcatcgcttgccctatattttcaactggaaatattgatatgaaaaatcaggtaccatgctgaaattataaacgcattggttgaattctccagcatccatcggtggttatgtctgcagtgctgtctgcccacactgtgcctatgggctttgtcaaccctggggattctagtaaacataagtcagctcgtgtcattcctaagctcttccctaccgtaaaagaatttgttattctcagtaacacctattgcagttttgtttatttcattgtatagtttctatgttccacactggaatgcagtctacaaaaaggaagggatcgtatatccctctgtcaacacatgatagactctcaaaactatttctgaggaaataaatatcaggaatttgaagaaaaacattattgacttttaacagtttttgaggaaattatctattgtgaggagtgtatagatactttagcatctataaattaaaattttcactcaaatatctgaagaataagtagaaatgttattatgaagaataaaatataacaatatagagagtatataaaaattttagtgctaaagtgccagtatgattagctgttgcattagttacctagctgcacatagattattcaaaaacttagcatcttaaaacagaaaacatttcattatctcacacagattttgtggttggggaatcctgaagtggcttagcagaggaattctggctccaaatctctcatgtggttgtcatgatttggttgtggctgctgtcatttgaaggcttggctgtggctggaggattcgctttcatgatgggctcactcccagaactaccaaattaatctgcctgttggcaggagtactcactttctcatcatatggacctatccattgcagtgttgcagtgttgcagtagacttaatcatagcagcagcgttcccccaaagggtgatctgatagaacaacgcaataccaaaatgtcttgtatgacttagccttggagtcatattctgtaatttccctggtatcatgttggttacaccatttagcttgattccacaatggaagggacctaaccagggcctgaccaccacaaggtgagaatggaggggggcaacaatggaggctgcttaccactgcaataatgccagtcttggaagttccacctcctaccaaggaaagcgtggatcttacaggctctgttaagcatgtttatattaattgacaaagggaatgacaaggacaagccaaataatgagactagtggatttagttttgtggtattatgtgagatttttaatttctctaggcattatttttcattcctacttaaaagagctgttgtgataatgaaattgaacatgtgttgaaagacttgacaactctaacatagtagtagtagtatgtacataggattgattattttcatcatcaagaacacctcttatccacacaatttccagcagagataatttaactgacatggagattgaattagtactatattcttgccacatgattttttggatgttggcaggttatatgtatgataaactgactgaaaactcaagacttcctcacatacagtaagtgttcatggtacttacttactaattctaatccctagcagatgttttcattaaaataatcatagtgaaaactaacatatgagcattggttaggagcaaccatcctgtatttacattttgatcaatatcagaagaattgcacagactctcataaagcatgttgaaaagagactttaaagtgcattgtataatttatggtatgttacaaagaattttttttctcaatttctagaaagtatctgaagaaagagtatctggggagaaaatcatttgttttggataaacttctgtctcacaatatttatcttccaatttgatctcttttagaaactgttacttgagctccatttttcccacttggttacttaggttctattttccctactgtaccagggccaactgaatctattacaaaagccccttagcattttcttctgattctgttgtcaaacttcttgtaacctccaatcattaatatgtttctgaatttttagtgagaatattgctctacatagttaattaaaatttaaaagtacacctaaacttatgcctaatatgatacatgttatatatattttaaatttcaacttttactttagatacagtgggtacatgtgcagatttgtcatgtgggaatattccatgatgctgaggtttggaatatggatcccatcacccagatagcaagcatagcatctgatatcttgtttctaacccaccccacctctagtagtccacagcatctgttcttcccatgtttatgtgtatgtgtgctgaaagtttagctcctttttataactgaaaaatgtggcattttgttttctgtttctgccttaattcgtttacagttacagcctccagttcagtccattgttgcttcaaaggacatgatttcattcttttttatcgttgcatagcatttcatggtgtatatgtactacattttctttattcagtttaccattgatgggcacctgggttcattccatgtctttgctattgtgaataatgcagcaatgaacatatgagtgcatgtgtctttttggtagaatgatttttttttggtattttttattagataggtagatgtagatacagacatagatatacataggtatataaaatacaagtaatgggattgctgggtcaaatgatagccctgttttaagttctttgagaaacctccaaactggtatccacagtgactagactaatttacattcacaccaacagtgtataagtgttcccttttctcttcaacctctccagcatctgttgttttttgactttttaataataaccattctgactcatgcgagatgacatgctattgttgttttgatttgcatttctctaatgattagtgatgctgagtattttttcatgtttgttgaccactggtatgtcttcctttgagaaacatctgttcatgtcctttgcctattttttaatggggtcatttgtcttttgtttgttgatttgagttccctatagattttggatattaggcctttgttgaatgcataatttgtaaatatcttctcctattctgtaggttgcttgtttgttctgttgatagtctcttgtgctgtgcagaagctctttatttaattaggtcccgcttgtgtatttttgcttttgttgcaattgcttttggtgacttagccaaaaattctttgccaaggctgatgtcaaaaagaatatttcctaggttgtgatccgggatttttatagtttgaggttttaatatataaatctttgctctattttgagttaactcttgtatatagtaaaaagtaggggtccatcttcaatcttctgcatatggccagccagttatcccggcatcatttattgaataaagagtccttttcctaatgcctgtttttgtcagccttgccaaagatcagatagttgtaagagtgtggctttatttctgagatctactctattccatttgtctatttgtctgtttttgtaccagttccaagttgttttggttactgtggctttatagtatagttggaagtcgggtagtgtgatgcctccagctttacttacaaaggtattctcactcatgtcttaaggtacttaagagtaaatgttctaaaatatcacatatattttaaagatatttgaaggtctttaattgctactgttaaaagtacagtgattgtgtttctaatacttaaaacattagttgtgttaaaatataacagattatctgaattttttttctcaatttgaatggataccctcatgtagaccaatggcctatgtaaatttccaattttatatagaagatatttggggcttaaaccttttatccttttacaaattcacatagctgaatttaaaatttttacatgattctaaatacattggaagggaaaattcaaaactgaagtgtttaatcctttttttaaaaaatcacattatgtctaatgtctaattcactgtctgtgactattaggtatcttctggcactgtaatattccaggttgttccctcccactgaaaatctgttctcatattatttttcccagatagcaatgatatttcatttttcaaagttcaagcttgtttttctcacagttttttaaaataaaagttactcgtcttacaaaactacttaacagtttacctctatcctcatagttcacattttatgttgtctgtcttataactaattaattaaaatgtgataaaaatgcccccaaaataaaactattcaaatacgtgacttgaagtaacaagaaagaggacaaacatttaaattttcttcaaagcaacttcaaggtatgaactttgttatgattctctatgtattcaataaaacactgctctatacaactaattaaacatttcacaccatgacctttctttgtgggattaatctatgtactaagagatttaattggatactgggtcaagcattggatgatgtatagaaaaacatctattgcccacgcacagaaattcatgaaaccaaacaaacaaagacatcgattatctagaaatttcaggttaaaaatgaccttctcagttttaaataataggtttgttttcaaaattaggttgacttcaaagttttagatatactggcattatccttattttaatgttggttattcatagaaagagccaatacctatttttttaaaggggttaaatatgtctcatatgatatctttagatttcaggctctattattacatttatgaagtatattgcaattatctatttctagctactcagctaaatgttcagctctcaatgtctattcatttagtatcgtctatgttaaaaatgcaaaacaattattatctttcaattaaactgttctacactttctagaggctgatttctaagcaaataagattactaaagaatagtattcattcaaggttagaaacggattgtgaaatttaagtgaatttcttacttatatatgaggccaattttatcgagcatttttcatggtcatatggcttattaatagaaggcaagctaaagtatatctcaatcacacaacaaattaagtaccatgcaatatttaattggtggtactcatggggtgtaataataaaattaactttatttctgtcttccatcttaaatctctcagtctggattttcttccccttaaacaaacttgaaaaggtagaaggactccatggcatttctgatcacaattaaataacaaaaagtccaacagccatttaataatagaaacacagtttcaattcggtaattaaaaacatccagtatattaatcgatactacaatgatcattcaatgataagactttttttttctcagctaaatccagctgtaatggttgtcagctgctttaaggtaaaggaggcgtcatgttttgtctctcactcattactcgttaatttttcttttttctactatttaaccccaagggaacaaagagattggagagaagagaggtgaggaaatcaaagagtttaattcactggtgctttgtaagatggctttgcagtcttctcattattaaatatttaaagcttattctttcacaggtactttcataagtcctttgctgaattcttcaattaagacatggcctccacttttcctttagccagctgctatggtttgagtgtgtcccccaggtttcatatgttgaaaatttggttcctggtgtggtcattttgggaggttgggtctttaagaagtgattaggtcattaagaggaataatgccactctcttggaactaagtaatttctcacaggagtaaatgagagcagataagttaccttctccagagaccagattagctacctcgagagagggttgttataaactaaggccaccctttgcgttttgcccctttcaaacacacccacttccttcttcctcttctctgccttgttacaatgaattatgaaagccctggccagaagctcctgccatgtttttggactttgcagcctccagaaccatgagtgaaaacaaacctcttttttataaataactgatttcaagtatattgttacagcaacaaaaaacaggaaaagtcagcaaccacttcagatttttattcttcagtgtctgctccacaggggtcctattattgctggggtcctactattgctggggtcctacagccacagcagactatctcttgggctgacttccctacagtggttgctattgatttcaggaaccacacatctttggtccactgtctgacagtagtgtagctgctttcaagtttttaggccccctttctgatgactttggtcactactttccacaagtgcgaattagaatttcattgtctgtgcccttctaactacataaagtacaatgtaagctctaggaatgacctagttaaaaccttatatggtctgaatatttgtgtcctgcaaaagttgtatgttgaaacctaatcaccaatgtgctgatgttaagaggtgattacatgatggcagtacagccctcattaatgggattagtatccttataaaactaggccaacagagctccttagtctttttagctatggaggacacagctggaagacaccatctataaatcagaaagcaggcccttgccagacaccaaatttattggcactttgttcttgggtttcatagcttctagaactatgaaaaataattttctgttgtttataagctaccaagtttatcgcattttgttatagcagcctgaaccagccaagataacagccctctgactaggcttacggttagaaaaagaaccttatcacctcctctatactcttttctcagtggagagtaggttaaggctaacggcacttcctgaaaatgtggctcaaaactcatccttttctatccatactctcaaacacttcacatcatagatatgaacaagggaaccatttatcagtcaacagctttaaatctccacatggaccagcaaatcttttgagataaaacaaattttggactttgatagtttagctaagagttttgagtttagcttttttttataggtgctacatattagacattatcatggagatgcaattctgaacacaaataattatggtgtctgtgctcatggagcttagtgtctattaattgaagggaaattagacattatttaaataataataaagtgtataagtatgggaggtgcttggaaagggaagcgaatgttgttgtgagacgtattctaaagatggttggacgagtagaaggataagtggagccttctctaggtaaggaaacatttctttgagatttgaatgttgataacaaattaattccatagcaggaaaagtggggtatagggagagttatgaataacatatgaggcagaggaaacttctctgtaatgttttaagttgtgacagacagaacaaaaatggtctatggggcttgtttgagagagcgaggagttcttgcgggaacgatatgaggactgagattttcacagagagcagaaagttatgcagggcacaaggggcaatgttaagcgtttatttttttgtcttaaatgcagtgcaaatccagcaaagggttctgagttgagggtagaagttgaggatgaaattaatattttgaaaagagtcattggttgtaattggaaaaaaaatagattttttgtagagaagcatgcaatagtggatgaggaagacaaagaggcaactgcaacactctgtgtgagatttgtttcaactagagtgagatagcaagatcttgcaactttaccatacagcttataacctcacttgcccagctttactttttagactgtctggttgcctggttgctagaacagacacatttttgacaaggtttagagtggcacattttataaaatgataggaggcaaatgtagcccaccagtgaaagtctgcctaatggctgatgcagaaagttccactgactctatacacttcaggttcaagtatcatctatggtactttactaaatttgatattgtttagacattaaaggagattcacattagataactacttaaaaacaaactaaatgggtgctacctttatcttcgtgtctttcttacaaaatgcttgcatgacttataaggcaatagcatgcgtagaacaactccttagtgcaaaagagtgtatctgcaatgatattttgggaagtgtccactacccactcttaatccttgcagaaaagggctttcatgacatggatgctttctattactaaaacatgctgtaatcttccactagtccccacctcacagtttatactccaactttggtaagctatttttgttcccatgacccaccatgtagtttcatgttggtagagttttccaagtctcttggcttaaaaaaaggttgtgtccctcccattctcttggatttagatttcttgttctttagcatttagctcagatgccatcacaattaggaagccccaatatctcttgtcactactccaatcccaacctcaaagcaggtttaaatatcctcctcttgtcttctctaaagtccattaaagttttattcatttcacttgtcacgtgtaattagaattttctctttgaatatctgattttcctacttcaaactctttgataggtttgtttttaattcgcttatgcctgcttagaacttagtacactgtgtaaatgatagatacacggaaaatatttgttggagtaaactaagctggtgtcccacaaaatcttttcagtgttcactatgaaaacacttctttgaaaagtgtgccttgttacgtgtatattggctctaatggttattgttgagtgcaatctttcattcaggacatgcacctcgactttgacactaattagattgaatcagttaataagattgccatggcatatttatgacaacagttgtggaaataagttattacctctgtagagatatttcaaattaatcttatattttctccagtttcttcatctttagatatgccaaataaggcaattgagcattcactttttttcagaatgcattttaggagtaattttgaagtgtgaagtgttgaaataatatgcatttatctttttcctcttatctcagagctcaaaatgataatttattatattgagattgtaggagctagcactatggaaatgcataaaaataaagaacataaaactttttgtaataatttgctttttggcaaacaaagtttaaattgtctttaaatcctaaaagtatatttgtaacaacaagctttatactattaatattttatgtcagtatgcatttgcaactgataaagtctcttgaaatataatattatttcattcagaataatattttttgtatttgtggatctttgtgttgtgctaggaactgaggctacaaataaaaagagacataatttctattctcctggatatttcattctaattagggagacatataacaattaggatgatgagaattaatggcacaaagtgcttgctagggttaagggcagtgacactgagggttttcctaaaatttttgaggtaagacaaataacattgtcttttggttgacaaatgaattcgcaaagaaataatggtaaaaaacctgaagatacaaggaacaagttactgaatgtagagatcatatttaaagaagtggctactcagaacagaggttggacagtggaaaaagaggatcatagaagcacacatagttttaatcaaagggctgtttaagggaatgaggattttagtaaaattgttttaaatattctagctcaatggctgtttaattatatcattaaaagttatgctagaagttcatgcaaaaaaaaattttaagaagaccacacactttgtaaagatgaaaaccataatatatgttattttttcaattcttttcattattgtttcatgctaaccaaacacactttttttttctgagatattggagacaggatctctctctgttgcccatactagagtgcaatgaggcaatcatagctcatggtaaactttaactcctgggctccagcgatcctcctacctcagcctcccaagtagctaagactacatccatgtaccaccaggatcagctactatttgtattttttttttttttagagacagggtctcactgtgttgcccaggctgggcataagtgatcctcccacctcctcagcctcccaaagcaatgggattacaggtatgagccactgtgcctggcctaaccaagcaaactttcattgttatgtggtttctaggtctcctacagggcaaaaagtagtgctggttaggccaagataaatattcctatctcaatgaaaattacacatctctttatgttgacagattatgttctgatgtgagctgatgtgagctagtttaatataaagctaccattagaaatagataggtccaaaatgctctaaaggaatcaagttgcagtacctgcagaagtggagactatggcaaatttgacaacatagaaaagattctaaatggcagagatttaggtagaattagagagagattaggtagaatttgagacagaatgcttcttaagttcatttcctgggttaactacttgtcatcttgaaagatttgctttctgttcatctgtttctttatccatgtaaagtgggggagtatgttatttaccttctatcattattgtcaagttattaatctattttaaaacagaaaactgtgtttacagaattataaacagcaatatattctaaagtctacttacaacttttaaaaacttggaaggctgagcctccctgtgcctcaatcagaaagctaggggatcaataagccatcgatacagctgttgtctccagaaatacaccattgtcacttcggcctatggatcagagagcaactgcttcagtatttggttctagagccacaccctctcttttagatcattaattacagattgttatggtttggatctgtgttcatgctcaaatctcatatccagttgtaatcgccaatgttggaagtcgggcatggtgggaggtgatcagatcatgggggcggtttttcatgtattaacaccatcccccttggtggtggtgtggtgacagtgagttctcgcgagatctggttgtttaaaaacgtgtggcaccgcctttctctctgtctttatcctgctcctaccatataagacacctgctaccatgtggccatctgcaatgagtaaaacctccctgagacctcctcaaaagagatgctggcatgcttcccgtacagtctgctgaaccatgagtcaattaaacctcttttctttatgaattacctagtttcaggtattactttatagcaatgcgagaacagactaatacacaaatactacaaagtattggcattctctgttttcttaaataggctccaaattcagatactgtgaaattgcatctgattagcagatcctcaataacacccataaccccagtcacaggggcatctacggaatgaaatttagcttcccagactttgtaacagaggaagagagaaaatttactacaggggtttggtaccccaatctactatagcagatggtacccttctatcttcttttagtctttaaaatgtatatagattgggtagtcaaagaggactgctatcagtggatgcatatcaaatgaacttttaaaaatacatgaataaccaaaaactccatctcgagttactagggtagccaaaaactcttagggaccccccagacaaagagaaaagcaggaataaaattgccgaaccaatatcttgtggtatatctgtttatttctaagctagttgtatttgtatggctagagagcataatctgaaaacgaagcggtgaattaagtttggaactgtgcaaataagccaaggcaaagcaaaccttgtagtcagagtaagaatataaatttcatcctgtagtcattagggagctactagaattattttaagtagagaataactaattatatttgcattcgtgaaataacactccacagcagtaggaagcatgatttggggtgagaggagagtttcccatgcagaaggcaggcaagacaagggccaagacgatttacaaatactgaatccagaaaaagaatgatgagaatatcagtgaagggtacataagtggtaatggggataggagattttgtacatttagggagctttaattttataacagtaaatatttgggtgggtaagatattataagtgataatttcaaggttagaataatttttcaacattggaaacattcatacctagtgggatgggtttggggagaacaagatgatttaatttccctgtacttaatatatttatctgcccaaagggtctttcataagaagatactttacatacagttaattttataggcaacatccagtggacaaggggaataactgatgtgacataagtatttgtgaatcttaaacataagcagaaaataatgccatgagcgtatgtaaggtttcacatatgaagctgtacagaaggagcaaatcgggggatgaaaccctccagaaaaccagcttttcagtacagaaaaaaaggagcctccaaaaagactgaaaagatgtgggaggaaataaaaggaaaacaccgctgcagtagcagagaacactaaaggttacagagaagtcaaagaagataatattggaaaatatttatggggtaaacacttgctattgcaaacactggcaagagtagttagtataaaatgacaaaagaagaaacctgaattcacggttggaattgaggatggaatgattaataagtgaaaactaacactaaaaataaaagattttcccaaaatgtttgactctaaagcaaaagaaatatttggtaatggcaagtcaaaggtccacgcaaaagtaaaagggctgtgtgtgtgtgtgtgtgtgtgtgtgtgtgtgtgtatgagtgtgtgtgtgtatgcatgtgtatccgtgtgtgtgtgtatgcatgtatatgcatgtgtgtgtgcatggatgtatgtgttttatttgctttgttgatttgtttgttatgatcggagagaattcatatatttacacaatagaaacataagtattcaaggctataaattcatggtttgtcttgttgggttggtgttgctttttctgggtttgtgtttgggataatcataggttgagagaaaaataatcaggaggaggaaaatcagaacggttgattttctttttatttttttgagacagagtttcactcttgttgcccaggctggagtgcaatagcacaatctcggctcaccacaacctctgcctcccaggtccaagcgattcttctgcctcagcatcctgaatagctgggattacaggcatgtgccaccaagcttggctaactttgtatttttagtagagacagggtttccccatgttggtcagtctggtctcgaactcccaacctcaggtgatccacccacctcggcctcccaaagtgctgggattacaggcttgagccactgcaccaggccggaacagttgattgttattagggaatagattgagaaagacaaactgttagatagattaaggaataagtaagagagaatgagaaggtccctctgtttttagcattttaggggccaggggtcagcacccagttaacacagtagaaattgtgaagtattgaaagggagtattaatatatcagaaagtaataaaattgcagtgtaaactcccttttgccaaatttttaagtattttggagtaagattttattcatatttcagaggcataccataatgacattactcattactcaaggaatgagcaagctttttcaagttttagcaacatgataatggtaaaattataggaaaagggtgaaattgaagaaaccgctctctcattgaatccttgcactgaatttcaggtagatatggacctctgtaaactataaatgagaaaatagtgactagcatagttattaaagaggcacagccaggattagaaaacagtgtttaaaaaataaaattaaaactttctcattttaacccattcatcaatgtaagacagagaaaaaatacatttagaaatggcataatggaggctgtaactagtacagaaaacttcctattcttttttatgttcttaaaaaagttaaaatgaatctttacatatctagcaaaatccccaagttttactccaaaacgttatttttcaggaacaatgatttattgaaagagaggagtaataatggattgaatagaacaactttgaagctgtttgtaatttcctctgaggcaaagacgttgttcagaaaacattcacagaataaataaatctttgcttatctaaacgcacgcatgatgcttactacactatgttctcctgaaattgcaagcattaattcatttattctttcaagcgtctgggtctattgactctttctcttatgggaaaagagactcaattcagtattgtaaatgaagataatttaatcgagggaatttattacaaatggaagtgctaagaacctcaacgagggaagatgaggcatcccagtaagcaacggcagaaacctgcactagtttttgagtggagacaaaaacaagaggagcagagattgccagagcctagggcccaagtcacccaacagaagctggaacaacagaggtactatccagcagtagctagagccacggcccgcagccattgtccaggggtagacgcagccatgaatgatgcacagttgttagagaagtcaacaaaggaagagagagtgttaagggctgaatcatggtcccttgaaattcatacgttgaagtcctaacacccagtacttcagaatgtaactgtatttggagatagggtctttaaggaggtaaatatgataaaataaggttatatggacaggccctaatccagtaggactggtgtctttataagaaggagatattaggacacagacaacacataggctgagaggccaccatcttcaagatggtaacagaggccttagaggaaaaaataataataaaaataaaaagaaaaccaccttgctgacactttgatcttggaccttcagcttccagatttgtgagaaaataaatctgttattaataagtattttgttgtagcagccctagcaatataacagagagaagctagaactataccctggcttctgctttcctctagcccgacagcccccgatctttgcctcccgttggcaaacacaacagttgacctggatcctggaaagtgtagcctacaggagtagatcccctgtgtgagatgaagcagaacagctaaaagcacagggaaagcatacatcataacaaccttacatactgtgctacgcctattttaaagagaagcaactgtgaggctcagataggtcaagctacacacctgaaatcacagctagttatggctccaagtccatgccttaatcaatatctatgctgactctcagggttaataagctccaggattgttacaagttgatgggttacacctttcctttgctaccccttttaccattttcagtaaaaatatttaattaggataatctcagaatactaatgtaatgtacagcatcaaaatgtgtgtgtgtgtgtgtgtgtgtgtgtgtgtgtgtgtgtggtgtataataaactctccagaatgttttgccaaactgattccactaaatcaaatattaccaaatgtttaaaatggctaacattttaaatgttatatcttgtttctttttttttctttttttaaatcaatgagttgattatcatgagttgattttttttttaagataggatatcattctgctgcccaggctggagtgcagaggtgccatcatggctcactgcacccttgacctaatggagtcaagcgatcctcccaccccagcctcccaagtagctgggactacagatgcacacaaccacacccagctaatattttttgtagagatggggtctcactttgttgcccaggctgatctgtaactcctgggctcaagtgatccactcaccttgacctcctaaagtcctagtttctaatctttttctttgttaagtgctatgtagtatgcatttatttaaattgggagtgtgtgggtgtgtgtgtgtgcgcgtgcgtgcgcgtgtatgtttggaagaatttaacagcagcttaaaataagactattaaaattagatgttctgtgagataaaaattatattgtttaaatttgcccaagggtattttattattcctttcattggctaaccagattatcagattattgatgctttcacttctgtacacgcatctgactgaaattagtcagtcttagttttgccagaacaattggttaattaggaaggaaactcataaattgctgagggttataaaaagaaagaaactagatgattatataactcttttttatctgatccaagattatgagtggcttatagacaggggatccgtcttaagtgttaagtgttttgttcataacagaccatctgaacctactcttccatgatttatcataattcatcagggtctcctaactcatgcttgagtggcagttttattgctattaattccaataatttggaattcatgctttaaaagcattaatgagacatctaataaatgcactgatttctgccagataagtaaatacaaattgttattgggtaatatgttgtgcatattaatgaaaacgttttcaaagtacatgctctatccaatgatatcattgatgcagtcgggcacttcataaattgttcaaaagtacttataaatagtgtttttgaacaaatgagtggcctactgaataaataatttgattacttcataaaaaatgtttttttctggagcatttctcttctaccagcataaaatttgcaatatatcctcactctcctacttctatttaaaactttcagactctgagaaattctgataactccataataaccttgagaggaaagctcaaatggtctttcatgtcttaggatcctgaagatgtatcacctttttaatagaatctcttggttgttttgcataattcatggctcacataagactttaacaaggagaaatgcatactttatatgatgttttgctggcattctgcatattgattgtctattatattttatgtcttgattgcaatatttttctgaaataattcacttttaactggtaagactataatactaagagtgacttgaaaatatatatactagtagtttttgatatttgcgtactctaatcctttgtcatttcatatttcaaagctgaggcaattctagatgctatatgatttataagacattaagaaagaccccttttggatagagcttcatgatcatctgtcagtgatactagaacaccaatgctttaaccaaatcttgcatcagaccctccccagaaaagcactgaggcctgtcagggggtcttggggatgttagtgggagggagagcatcaggaagaatagctaattgatgctgggcttaatacctaggtgatgggttgatctgtgcagcaaactcccatggtacacgtttacctatgcaataaacctgcgcatctggcccatgttcctggaacttaaaataaatgttgaaggaaaaaaatcatttaagagcaaagccttaataatgtttattataaactattgttatttccccccaaattgcaattatagtacaatgcagatgaatattcatgcaataagtttcaagataaagaaataatattttcattgatattttaagcatacctcactcttcattttcactttagaggggaaaaaaacaaagcaatcaacctataaacataagtagaatgattttcaaagtacttgattctttaaaaatgaactttaggccgggtgcggtggcttacacctgtaatcccagcacttcggtaggccgaggcgggcggatcacgaggtcaggagatcgagaccatcccggctaacacggtgaaaccccgtctctactaaaaatacaaaaaactagccgggcgtggtggcgggcgcctgtagccccagcgactcgggaagctgaggcaggagaatggtgtgaacccgggaggcggagcttgcagtgagccgagatagcgccactgcactccagcctgggcgactgagggagactccgtctcaaattaaaaaaaaaaaaaaagaagtttaagtttttttataatcctacttttactagttgaataatctaagcccctttgtatgtggttgaaatggctatttcttattagtcattttttttttccactaataaacaatgtgtacaaatagtgtgaaattcatagtcgtctttcctactctaaccttcatttcccggtgcaaatatgtttgctttggagttttctgaaatttgattcagaatgaatttatcttgaatgacagaaaatagggatatgttaaataaaggctaatcacaaggagactcaaaaatagaaaatatatttataaaagatgtatgtaattcaacctttcctgaaaatatatctaagcacatttctaggtcacacaataaatagaattgaatccttccaaatgaccacttaatttttcccttactcttcaagaataatactgtgattgcttcaccctttgaaggtaaactcgatgataaacataaaagattcaggaatctgagcaagtaggcagcataaaaaaatcagtaaaaatggttattcttcatttttatgcagctgtttgatttttttcttttgttcaaatgatggtattgtaaagtagatagagcctgagatgacatgattgtacgaatatgtgtgagaagtaaacagatattcagctctgaagacaatgctgcctttcttacccattttggcatgtaaaagagaacattttgacctagtacagtctgcaatatgacaatgaaaatgaaagtaatacttgagttaacatgctaaggcacaactccaggacacatcgttttcaaagtcactctttttaaatttaatataaagaataaacacattcatagtactgggaaaacttgttattatatcaaaaaataaaatctctactttatttgtctaatgtgatttgtccagatagatttatagatcattgcataaaaattcaccaagctcctttgggaaatacaaatgaaaattcaacctgaaaatctgatatatttgttttagagttgtggcaaagcagtggttttcaactaaaggtgattttttttttccctccaggggacattttgcaatgcctggaaatatttttgtttttcacaactgggaaggtgtaactgtcatctagtgggtagcagcctaggatgctggtcaacatcctaaaatgtacaaagccctcttataattattcagcccaagatgtcaatcatgctgagactgagcagccctttcagaaataagtgttgttttgtggaatgtgaagatgtgtctctccttgaaaactctgttgtcattgtgctcagatgtctctataatctctaagtcaaaattgtacctctatcaaatctctatggatctgtgttgagaaaataattatatggctctttgctctgccaccagattatgatttatgggtaagattaaaaaattctgaactactgctgccagccagatgttaaaaaaaaagtttatttgtaaagagtccactgttgatgattacttgggtaggatgggtataatgtaagagggagaagaaaaaaagtaatcaaaacagtaaatttgagaggtatatcctaatattttgaaatgaatgacagtgacagcaagcatgcccagcaacagtaccctgttaggaaacactgtgaagctgaaataagtccatagagccagaatctaacctcataagctctgatgttctaagaaataaaaagattaaaatccactggctaatatcgataggctgggggatgctgagggaagaaatagatcattatttctcactatcagtattctaaccactgtcaatggagcacttgtgcaaatgatgccaaaggacaagctccaaggtctgtatgaggtgttttccccttgatggataagaggagataatgaaacaagtgtccatgtgtatgttaggtattttttacattattcttctgggttttctttttaaaataaagagaaattttacattagtgcttttagttttcaacatgttttagatctgttttaaaaaatcaaaaaataatataaatggtaatgttgacccaattagcagaatgctttaaattaaagttgtctttctaaataatactatttactgtggaatcaaaaataatctatcattcagccttctgactgggtctttataaaattaactccttgtaagttagcctcctactactgatagggcatcgaggagcaattcatgcccaactcgtgtatgacctatgcagtcccatgggactctgtactcagtttaatattatgctgacattgtcttgaaattattaatgatatttgaagaaagagccctgcatttttattttccactaggccctatacatttatatagccagtcctatgggaaatatttgggagaaaggacagtgaagagctgtctttgctctcatgaacacatcctggtagaaaagtaaccataaggaagggtctgagtcctggtcctagcagatgggggccactgtagtcaacgtgacatccatcccattaaacaagattctttacatgaagccattaaaaaaatgaaaccaagtcctttgcagcaacatggttggagctggaggctgttattctaagtgaaataactcagaaacagaaaatcaaatatcacatattctcacttataagtgggagctaaacaatggcacacatgaaagtaaagacggaaataataaacactcagggcttcacaaggcaggagagtgggagggaggtgagggttaaaaaattacccattggatactatattcaatactggggtgatgaatacactaaatgcccaatccccaccattacactacatacctgtgatggttaatactgagtgtcaacttgattgcattgaaggatgaaaagtattgatcctgggtatgtctgtgagggtgttgccaaaggaaattaacacctaagtcagtggactggaagaggcagacccaccttcattctgggtgggtaccatctagccagctgccagtgaggctagaatataaagcaggaagaaaaatgtgaaaagacaaggctggcctagccacccagcctacatctttctcccgtgctggatgcttcctgccctcgaacatcagagcccaggttctttagttttggtgctgggactggctctccttgctcctcagcttgcagacggcatactgggaccttgtgatcacgtgagataatactcacatgcacacacacgcacacacatacacattacctactctgtgtgtgtgtgtgtatatatatacactacatacttatatatattagctatacaattatttatatttattatgtataattatatatttatatataattattttatataattattattacttatatataattaaacacataattttatatatatatatatatataattatttctgtccctctagagaaccctgactaatacaatacccatggaacaaacatgcccatatatcccctgaatctacaaacaacaataacaataacaaaacacatggtgcttaatatgggcactattgataatttagttgccttgttgcgggggctttcctgaacactgtagaatgtccagaaacattcctgacctccttccacctcacacaagtaacaacagcctcctctcctcctctatccccagtgaatttgtgggtcaggtttggaaccagacccacttactggatgtatgatcatacatactggatggacctgaagtggtaaacaccactgcagtgtactaaatagttccaaacaagactggagagtagttgaattttaagtagcacctatctgtcgccagaagatacatacatagctataggagatgtgatgagaatattataattctagaaataagatttgagctagctatttcttgcttttaatttaatggaaatttgcttttgttgcatcctcaagtcttctaagcaatcaaaatgtgcgtctactaagtaaaagatatttcgacccttgcaattgggttttgttagaagggtaaatatggctatagaaataaaacaatttatatcagcataaagaggtatatatttgaggtatcaaatgagtggtaagagtgatgaattctagaaaagtttagagatttagaaactagagtgtcgtcagttcttccagtctacctgcacccccacccccaaacttccaagaaatgtttgagtcttatggaaaaaaagttatttgaggccggccatggtggctcacgcctgtaatcctagcactttaggaggccaaagtgggcggatcacctgaggtcaggagctcgaaaccagcctggccaacatagtgcaaccgcgtctttaataaaatacaaaaattagccgctaggcatggtggcgagtgactataatcccagttacttggaggctgaggcaggataatcgcttaaacccgggaggcagaggttgcagtgagttgaggtcccaccacagcatgccagcccggcgacagagtaagtctccgtctaaaaaaacagaaaaaaaaaaaaaaaaagaaaaaaaggcagttgagtatggtaatagttcttgaagttctgcagtcaaagcaatatttgtttttattgagggttatataagcatgtgttggaggccatgtgggtttgcatatatttgtatgtgaaagaaagagagggaggaagtagattaatgtctttcacacatgtccaacagaatctaagaaacaatgctatgtttcatgattttgatatacattgtggacatattgaatatttttcttttgcccattcatttattcactaatgaattttttcatttataatttaattgtctgttgtgtgtcaggtatggttctaggcttacaataataatggccaaaaatgtactgacacttttggaatgttccatatgccttttagattaaattggtgtgtagcagaagtagcatttgattagcatacccagaaagagtcaaattcagttcaatttatggcagaagaaatatttaatacatgccatttattttgtcatttttatgttaattgtgtcataagacataagttaatgcattctatattcattaatactgcaattcctaattattcactcttattcccagaaaaagaaaaaataatttttccaatggaatctacttcacagcaagtcaggtgtttacactgaaatgcagcatctgttcatttttctgaaagaaagttacagataaattttccctagtttcagacatccatgtacatttctcttgagcaatattttgattgttattttgtatacattgtacatacattgtatccctgctgtgtatgatgcacattatgattcagtaaataaagttcgctgaaaaagctcttctgaaaatacaaatactgtccgtacaattttttgtttcatacaagtctatatatcacattctaggatttcctataccttgaaccataaattaacaacatatggaagaatctatgcggaggggcaatgttggggctattttacacacaaaactggttttcggctaatgatatccagaacccagaaatcacacctcagtttatcctgggcctgggttgaagagagagtactattagcttacttacaaaagtttctaaacattgttgaaataacaatgtaaaatcatctaaaaacaaataaatctgtatcttttaaatataatttaaaaatatttctgcttaatttttttaatctagacaatgcatcaagaatatttattatatttctgcaaatagttggtacaatagtgattccacatagtccaataatactttagaggtaccatagaggcaacgctagaatacctgtggaaaatacaatggctagttctgcatgctacatctccagcttttaattggctcaatctgaatattacaagcacacacatacacctacatgcacacactaatatctagtgttttaagtaaaaattaatatgaaaaatagtacaatgatcataaaggtttgaataaatattacaatataatttcaaattaatttggaaatatcattttatgaatattttaatgacaaaataatcagaatcattggagttgtagttgacattctagcttatgttataataaagctgctgggaatctgaaagctgagttcttccctatgtttaggattatactttgagtggatttggtaaacactaagcagttgtgtgtgtgtgcaagtgcatccacgagtgcaaaaatgacaatcatgagtaattttttcaagtagcgaacgtgaaaaaattaccaatcaaaaattagtgttgtaaccaaaatcgtgtgagaaagaaaagccttacccttgacgtcttttatttcgaaagtttaaaaaaggaaaataaggggcctggcgcggtggctcacgcctgcaatcccagcactttgggaggccgaggcgggcggatcacgaggtcaggagatcgagaccatcctggctaacacggtgaaaccccgtctctactaaaaatacaaaaaattagccgggcgtggtggcgggcgcctgtagtcccagctactccagaggctgaggcaggagaatcgctcgaacccgggaggcggaggttgcagtgaccgagatcacgcccgtgcactccagcctggagtgcactctgggtgacagaggaagactctgtcccgaaaaaaaaaaaaaggaaaacaaggaaagcattcattcatttcacgaaggtaaaataataataaagtccatagtagagatgtacttgttagaatgcactttttgaatctataaagttgcaaacagaaaagttgaagaatgacagttatctataagttattgaactcatctggtgtctgattttgtgttcggtattctgaaaacctcattgtttgaatctttttaacagtcctgtgaagctgacacttatctccgtttcactaagaaacgaagacataaagatataatggaagtgcccaaggttaaagagacagtaaatactagatgtggggttggaataagttctaccagactacctactctttataaataaattataatgtttataatatacaaatataatgaagattctttcgggaggtcaatgaaataaaattgtttctggatagattttaaacaaaaagtgttcctgctgctcccaaccaccttatatatgttttatatcttctgcgcctttagaattaaagaaatatttaggcactcctgaagaatcgaaaggagaaaattatggaaaaaaatatgagagagggttgaatagcaagcagtagattgtcgagaggtcttggttgcaaagatttgtagacttagcgtaggtaaatgtattttagagaatgagaaaattagaagtagctgattcccctctgctcagtgcagctggggaattggagcttttgcccacattggcaactgagcagataggttggaggaaagattccaaaaataccactgcctaactaaaccaattgcaagagactgcggtacttctgaacatggtacctctgttattcccaccagctaattctgcgccttactgagaaggcagaaagaataacataaccaataaaaatattactggtaaaaaaatatagtatctaagttggaagaaagtggtcctgtgttctttgagatgaatgtaattatataaagtaattttataactgttaattatatattttaaaataagcaaggaaccagcaaactggtagaagggggaagagtgtataaaacaattaggatgaaaaaactcagccaattaaacacatacaagaaaagaagtgagcaaaaatgagactgaaaaagtgggacaaagaagaacataaaataagatgttcaaaattatccatatagataagaattcacaatatattacatgaaataaaatttcttactaacagactaataaggtgaggttgaatagagaaagaaaatccagctgtatgctgtgtataaagatatactgacaatataaggaaagagaaacgctgaaaggtaaaggataaaaaaaatgcatgctagagaaatgataacaaaggaaagctggtttagcttcagtaatataaaaagaaatgactttcataagcggaaattattattaaaaataatactatcatattaaattcacagcaatgagataaagattcaaaaattatctgcaaaggatcacatagctccaaaacacatggataaaaatttgatagaaaatggaagaaaaaaatagataatctaactttttttctttttcttgagaggaagtctcaccctgtcacccaggctggagtgcagtggcgtgatctcggcccactgcaacctctgcctcccaggctcaagaaattcttgcacctcaccctcccatgtagctggtattacagacgtgtgccaccatgccaggctaatttttgtatttttagtagagatggggttttgccatgttggccagactggtctcgaactcctggcctcaagtgctacgcccttcttggcctcccaaagtgctgggattacagatgtcagccactgtgcccagccctaactttgttttttaaaacatatttctctcttattaagcagataaaaaaataaaggcacatataataaaaccaacacaataaaaattagaaattatctggtgaataaatgtagactatgacatcaaacgatttgatagtacatatttttctccagcacaattacaatatttgtttttaaagactatatgttaagagttttaaaaggagactttacaatagaaacaaaaatacaaaaagtacaccctcattaaaagaggatttaagtcaatggttagatgtaccaaattctacactaagaaatataaactcaattcaagtttgttagaaattttacttggttcataatagtatatggtaagttaattctaaaatgtttatgaaacaactacaataaaagaccatgaatacaccaagtacttttgaaggagtagaaataaaatggttggcttgctttaaaatattttggtttattgtggaaacagaggtcggatttcttagacgacaattaaaaactcatatatataatctagggtttaactttttcctgttctcttttccttttcctttttctttcttctttctttcttgcttgcttgcttgcttgcttgttttctttctttctttctttctttctttctttctttctttctttctttctttttttttctttgagacaagttctcactctttcacccaggctggaatgcagtggtacaatttcagctcactgcaacaacctgtaccaaccgggcccaagagatcctctcacctcagcctcccatgtagctgagactacaggcatgtgccaccacacctgactaatttgtgtattttttgtagagatgaggtctcaccatgttatcctggctggtcttgaactcctgggctcaagtgatcctcccacctcggcctcccaaagtgctaggattacaggcataagccactgtgccagtcctagggtttaactttcttatcaacacaggaaacatagaagctataaaagaaaaaaagcatgcttaggtgtataaaatttaaaacttttgtaagacaaaagatatgacaatgaaagctaggatatacaaataaatagaaacaatatttgaaacttaaggatcagataaaagattaatgtgtttactgtataaaaagcatatgcaattaaatccaacccagaatacaaatgggtaaattatatgaaaaaatcacaaatagcaaaaccatatagccagttaataaatgatgtcgaatggtggctcaatcttcttgatggttaaggaaataaaaaccaaattcacagtaaaatatcagtatgcttccagcttactaccaaaaaagaaataattcaataacatttacatttggcagagatggtgaggggctgaggactatttgagatagctaaaaaaagagagtttaaaaaaattaaatttttacgtaggcatttaaaaaattatgtaagtgtatcacacaaatgattttgcatcaaataacatagcatctgcatccataacaactccatgggacaaggaaaaataaaacctgagggaatggaaaaagaaaactttaaccttcactattctatgacaaaaccaatgagataaaaatagatataaaaacagcgaatcagatccaattataatatattgtattatacttattgaaaatagagattagacagtcttttcaaatgtacatgaaacatttaaacagtgattatatattttcctttaaaaatcaatatatttcaaaaagaaaaaatagtacataaagcattctttaatctcagtggaataaaactggacattgtattagtccattcttgcactgctataaagatatccctgagattgggtaatttattaggaaaagaggtttaactggctcccagttctacgggttgtacaggaagcatgatgctggcatctgctgggattctgaggaggtctcaagaaacttacagtcatggcagaaggcacaggggaagcaggcttgtcttacatggctgaagcagcagtaagagcaagagagggcgttggtgccacgtacttctaaaggaccaaatctcacaaaaactcactcactatcaccagaacagcactaagggggaaattcaccccgatgatccaatcaccttccatcaggccccacctccaatactggggatttatgatttgacatgagattttggtgaggacacagatccaaactgtatcagacatggataacaaatcagaaatacaaaagcccaccacacatgaaaattgtttgaaaattctttttcaagtatcttaagtcaaaagaaaataaaaactgaaatttcatctgggatacgataaaagtaattatcacagggacaattgatatttacaaaaggttatattaaattaaaaataaaaattaacatataactcgaaagcttaggaaaaatacaaaatgaaggtggaagaaaaaatagaaattaatagatcagcatcaaaatagtgttacatttagtaccttaattttaaagccagttatttaagtaaaacactagaataattaaacagccataataatcagaaataagaaagaacatataacgcaaatacacaattattatgagaaagtaaccacttatattttagatgtttaaagaagcttagcaacaactttgctgaaaactacaaaaacaaattgatatcctgaatgaaacagacaattttgtatgaacatatattcctctaagaacttctagtaaaataaaaataataactatttaaaccattcattaaaaaagagaattttttcaattccacaaaaccctcaaggtgcagatagtattcacattttgagataatattgacattttaagaaacataaatttctacagctattcaaaccatttcggaaaagaaaaagaaagaatttttcatttttttctgaagcttgcatagcatagatgcccaaattcttcaagttgtaaaaaaatagaaaacaataaaccaattaattaatatgtcagaaaaatgccaggcattgacaaatataaaccagaagcatattaaaacaataatgacaaggaacaatttttttctcctcaccaatgcaaaatagattaatatttggctaagaaaatatacaaaatttacatatctgtctatcccattttaataaaaatttaacatccattcataacaaaataaaatcaatcaaatatgaataaatagttctgtaatgaaattaaattattagaaaatatgataatgtgtatgaacagacaggtaaatgggtgaaaatggtacatccagaaatgtacctaaatagctataggaatttagtatatggtaaaggtcaggaagtagattgttataaatggaggatagttttctggaaaaacaaataaactcgaattccctatccattccaaatggaagaaaacttgaaaggtagaaaatagagtcataaaagtgacagaagaaatcatgaggattgcttcgtaatctcatagtggatgagactttcttaactataaccaaatggtgcaaagctaaaaatgacacgtttgcctacatgcaaatcaaaccgtttatgaccttacaaaaatcaaaatattctacatgagaacacaagtcatcaaaagcaaggacaatttgtaaaatgataaaattatttgtaacacataactgagacaattatgtaattataaaaacctccttggccgggcgcggtggctcacacttgtaatcccagcactttgggaggccgaggtgggcggatcacgaggtcaggaaatcgagaccatcctggctaacacggtgaaaccccgtctctactaaaaatacaaaaaattagccgggcgtggtggcgggcgcctgtagtcccagctactcgggaggctgaggcaggagaatggcgcaaacccgggaggcggatcttgcagtgagccgagatcaggccactgcactccagcctgggcgactgagggagactccgtctcaaaaaaaaagaaaaagaaaaaaaaacctccttcaaattattaagaaatagaaaaagaaacccaacagaaaaaaataggcaaaagggtaaatagtttacagaagtgcagacacaattagcttttaaacaaagaaaacatgttcaacctcctaataacaaataaataaatggaaaaaaactggtatgattttccacctatcagatagacagaaacaccagtgttgggtattactacgttgacagtatgtagtagaagatgcactctcatatactggtgatggaattgcaaaacgctgcaaacacttcaaaggcaaaacatctttattccttttgtttccacctttattttaggttcgggggtacatgtgcagttttgttacatgggtaaattgcatgttgctgaggcttagtgtatgaatgatcctttcaccaagatagtgagcataagagcccataagtaatatcccaactcatgcctctctcccaccctctccccttaaacagtctgcggtgccaattgttcccatctttgtgcccacgtgtattcaatgtttagctcccaattataggtgagaaccctgtggtacggtattggatttctgttcctacattaatttacttaggataagggcctccaattgcatccatgttgctgcaaagaacatgattttgttatattttgtggctgcatagtagcccacggtgtatacgtaccacattttctttatccagcccactgttgatgagcatcttggttgaatgcgtgtctttgctactgtgaatagcattgtgatgaacatacacgtgcatgtgcctttttgatggaacaatttatttttctttggtatatacccagtagtgagattgctgggtcaagtggtagttgttttcagttcttcaagaaatcttcacactgctttccacagtagctagactaatatacattcccaccagcagtgtataagtgtttccttttctctgcagccttgccagcatctgttgtttttgacttcttgatcatagccactgtgattggtgtgggatggtttcccatggtgattttgatttgcatttctctaatgattggtggggatgagcattttttcatatatttgttggccacatgtacattttcttttcagaagtttctgttcatgtcctttattcatttttcaatggggttatttatgttattttgcttgctggtttaaattctttacagattctcgatattagacttttgttgaatgcatactttgtgaatatgttctcccattttgtaggttgtctgtttgtttgattaatagtttattttcttgtgtagaagctcttttgtttaattaggtccacttgtcaatttttgtttttgttgcaattgcttacgggaacttagtcataaattctttgccagggccaatttttggaatggtttttcctaggttttcttctacagtttctattgttttcaatcttacatttaagtctttactacattttgatttaatttttgtatatgatgaaaggtaggggtacagtttcaatcttctgcatatggcaagctagttactccagcaccatttattgaataggtagtcctttccccattgttattttcaacctagaattaatgaataaattcctggaaacacacagactcctaagattgaaccagaaagaaattacagaccaataacatactccaaaatggaatcaataatgacaagccagccatgccaaaaaacaaaaacaaaaacaaccatggaccagaaggattaacagccaaattctaccaaatgtataaagaaaacctagtaccaatcctactgaaattattccaaaaacccaaggagtaggggctcctccataaatcattctatgaagccagcattattctaataccaaagcctggcaaagacacaatggaaaaaagaaaatttcaggccaatatccctgctgaagatagacccaaaaattctcaacaaaatttaggatctagaagcacatcaaaatttaattcaccatgaatcaataggcttaattcctgagatgcaaggttggttcaatatatgaaaatcaataaatgctattcaccatataaacaggattagcaacaaaaatttcatgatcatctcaataaacacagaaaaggccttcagtaaaattcaatatcccttcatgttaataacccccaacaaatcagacattaagggaacatacctcaaaatagtaaaagccatctataacaaacccacattcaacaccatactaaatagagaaaagctggaagcattccctttgagatgtggaacaaaacaaaaatgcccagtttcaccactcctattcaacatattattggaagtccttgccagagcaatcaggcaagagaaaaaaaataaaagaatttcaaataggaagagaggaagttgaactatttctctttgcagacagtataattctatacatagaaaacctcatagaccccaccagaaggattttagaacttataaacaacttcagtaaagtttcaagatacacaatcaacgtccagaaattagtagcttgtctatacaccaataacatccaagcttagagccaaatcaagaatgcaatatcatttataatagccataaagaaaatgaaatacctaggaatacagctacccaaagaggtaaaagagctctacaaggggagctacaaaacactgctgaaagaaaccagagagaacacagacaaatggagaaacattccatgctcatgaataggaagaatcaatatcattaaaatggccatactgcccaaagcaatttacagactgaatgttattcctaccaaactaccaatgtcatttttgagataactagaaaaaactattctaaaattcatatgaaaccataaaagagcctacatcaccaaaccaatggaaaagacacatagaccaatggaagaagatatagaacccagaaaaaagtcacagacctacaattacttgatcttcaaaaaaaaaatatctttcaaaacaacaaatacaccctttgactcaggcaaaacccattggggagtgtatagttaaattatacttacagttttgaaaggatacatgagcatatcaacagaagtaaagacagagtagaagggatataggaataaactgcatgtaactacagaaaagacagggaaataatgaggaaatcagaaaaaataagctccaaaatattgctaaaggaaaatggaaggataatgactattgtatatagtatgcttttttatataaaaatacaaatatatgtatctatgtacccatcatccatccatctattatctatctatccatgaatgtcaataaaatatctctgaaaaaaaccataaaagaatagatctttatttaccttttgaattttaatgtgtcacctcattaaaattaggaaggaagtcaataaaatttagtcaaaactttttatataatttttttctagattgagcaaatgaaatgcaatacaaatgatttctctttcaatgacattacagattattgcttgatgatagttgtgcatccaattctgccaagaatatgttcctcatatttcatatgctttattcctagagtttcatatgggaataggaaaacagcaagtgcagatgttgaatcagatatagggagacacagagtcaccttgagacatgtgaagccaagggtgagcctacaggcctctagatcttagggttgacttatcaagccgaagaagtgtgactgtgtgacttagtcctagtcacatgtcctctccaacaacttcagtttctccatccgataatgaagattataccccgcccccaacccacacacatagtcaaatcaatgtcgagcttgtagggaggctgagcagtatcccagtgagttatagcagtcagaggccctgaggaggcagagaagagcaggaaagagctgaacgtgaaagctcaggaatccattaggcagtgcaaatttaagtataagaaactggagagttgggctgggtgtggtggctcacgcctgtaatcccagcactttgggaggccatggcaggcagatcacgaggtcaggagatcaagaccatcctggccaacatggtgaaaacccgtctctactgaaatacaaaaaattagccaggcgtggtggcatgcgactatagtcccagctactcaggaggctgaggcaggggaatcactcgaacctgggaggcagagattgcagctacccaagatcgcaccactgcattccagcctgatgacagagcaagaccacatctgaaaaaaaaaaaagaaaagaaaagaaaagaaaagaaaagaaaagaaattggaaagttggagaaacaatctgaaattcttgattaactgacagacaagaataatcaggtataaaagtcaaattcctaaggaatggttttttaatgaccaacaattcatttacccatctttcgagcaaacacttgggtgtcaaagaatctttgtcttggcaatttcaaagttaaaaaatcatatatacacataatttttctatcaagtagctgataaaatataattatatatacaattataattaacatttaattataattatatataattatatatactttatatatataattatatattatatattatatacatatatatacagtatatatatatgcatgtattatctttttaaagcctctttaatagcttagcattccatggcttttcaccgttgatcctcaaaatagattccccgttttaactacaaattctctaaattgatattattctttagtactttaaagaaaattactacatatttattacatcacatgacttttccttcaatgcatgcattttttctcaccttttattatttttgatataatatattgttctacattatgtgtttgaaagctgtgttttctgctttcaatgctacatgaattaatgtaaaatataccaatctaaaatgtaacatgttacaacaattacatttatcacatgaagccataaaaaagttatatttattattcacctaagaaatattttataaacatgtgcctgcaggagcccagtattttgtatactaagaagcaaatgtgaattactgaaaggcagacaactgtgaaaatatttttctcttatgattgagttctgttcacatcactgatttatttgtagcataaagataaagaagaattcaaaatccatatcaaatgagaatcaactggatctagttaaggtgaaaaacaaaaagtatttaataaacaaattgtttcaaggacacacaaaaaaacaggagaaaattctcatgagatttacttcttttattcattttgtaaattgagtactaatcttctttgtatatataccacattcttagaaaacaatggtttcatttcaaagtgtgggctttttttcgtttaaatttgaatgtataaaagtttttagggccttattttcacaaagatacttcagcagagttaaatatatgataaatatccaacgaattcctattttactcagattttttgaaatgtgtagcttctacatgaggaggtcaatatgtcaatattatgagaagaattgtgatatgattggagatcaaccattttgagtcaaactccccaacagcttcaatttctctatttaagagtgaagatgagaatatcataggtagatcaatgatagatagatagatagatagatagatagatagatagatgagatatacacacacacactcaaatcaatgtcaagtacataagcaactataaagaggctataacaataacaatcaaaaaattggcaaatattcattaaatgccagttatgtgtcaggcatattattataatagtcactattattttggcataaattaacattttacacaaaatagatgtcactttttaaaggtattatcagtgagaatttccttttggaaaagctagggagtttatttttatgagaactcttaagaatatcaattgtgttttagcaaataaattgttctgggcatccaaattcaaagtaaaatgtgaaagatttgataattcattgaattataatcaacaaattatgtccagaagacataaaggaagggaagagcaaattggaagcagtaagtatggtagttgttgaagaaataagcaaatgcacgttggactgaaatgttaagcactgattactggaaacaatatggaagttaattaatttctttagaatattgttaaaatgattcagattacagaggaacagtgggtaaattttagtatttttttgttatattttaagttctgggaaacatgtgcagaacgtgcatgtttgttacatagatatacacgtgccacggtggtttgctgcatccagcaacctgtcatctacattaggtatatctcctaatgctatccctcccctagcccccgacaccagacaggccccagtgtgtgatgttcccctccctgtgtccatgtgttctcattgttcaactcccacttatgagtgagaacatgtggtgtttggttttctgtttctgtgttagtttgctgagaatgatgatttacagcttcatccatgtccctacaaaggaatgaactcatccttttctgtggctgcatagtattccatggtgtatatgtgcccatattattaatgggcatttgggttggttccaagtctttgctattgtgaatagtgctacaagaaacatatgtgtgcataagtctttatagtaggatgatttataatcctttaggtatctactcagtaatgggattgctgggtcaaatggtatttcttgttctagatccttgatgaatcaccacactgtcttccacaatggttgaactaatttacactcccacacactgtgtaaaagtcttcctatttctccacatactctccagcatctgttgtttcctgacatttttaataatcgccattataactggcatgagatggtatctcattgtggttttgatttgtatttctctaatgaccagtgactctgagattattttcatacgttttttggccacataaatgtcttcttttgagaagtgtctgttcatatcctcccactttttgatggagttgtttttttcttgtaaatttgtttaagttccttgtagattctggataatagccctttgtcagatggatagattgcaaaaactttctcccattctgtaggttgcctattcactctgatgatagtttcttttgctgtgcagaagctccttagtttagagttgctggcaagatggctgaataggaatagctccggtctgcagcttatggcgagatcaacacagaagacgggtgatttctgcatttccaactgtggtacccggctcatctctttgggactggttagacagtgagtgcagcccacagagggtgagccaaagcagggtggggcatcacctcaccctccaggaagtacaagaggttggggaactccctcccttagccaaaggaagccatgaagtactgtgccctgaggaaccgtgcgctccagcccagatactatgttcttcccacggccttcacaacccacagaccaggagattccctcgggtgcctacaccaccagggtcatgggtttcaagcacaaactgggtggccatttggacagaaactgagctaggtgcaggagttttttttgttttgttttttttcataccccagtggcacctggaacgctaacaagatagaaccgttcacttccctgggaagagggctgaagcttcaccagagagccaactggtctagctcagcagatcccacctccacagagcccagcaagctaagacccactggcttgaaattctcgctgccagaacagcagtcagaagttgacctggaatgctccagcttggtgggaagaggggtgtccgccattactgaggcttgaataggtggcttttctctcacagtgtaaacaaaaccactgggaagttcaaactgggcagagctcaccacagctcagcaaaaccaatgtagccagactgcctctctagattcctcctctctgagcagggcatctctgaaagaaaggcagcagccctaatcaggggcttatagataagactcccatttccctgggacagagcacctgggggaagggacagctgtgggcacagcttcagcagacttaaacatttctgcctgctggctctgaagacagcagcggatctcccagtatagtgctgaagctctgctaagggacagactgcctcctcaagtaggtccctgtctcctgactgggagacatctcccagaagtggttgacagatatctcatacagaaaagctccagctggcatttggtgggttcccctctgggacgaagcttccagaggaaggaacaggcagcaatctttgctcttctgcagcctctgctggtgatacccaagcaaacagggtctggagtggacctccagcaaactccagcagacctgcagcagagggccatgactgttagaaggaaaactaacaaacagaaaggaatagcatcaatgtcaacaaaaaggatgtccacacagaaatcccatttgaaggcaaccaacatcaaagaccgaaggtagataaatccacgatgatgaggaaaaacctgcacaaaaaggctgaaaattccgaaaaccagaacaccttatctcctccaaaggatcacaactcctcgccagcaagggaacaaaactggacagagaatgagtttgatgaattgacacaagtaggcttcagaaggtgggtaataacaaactcctctgagctaaagaagtgtgttctaacccaatgcaaggaggctaggaaacttgaaaaaaagttagaggaattgctaactagaaaaacccatttagagaagaacataaatgacatgatggagctgaaaaacacagcacgagaacttcgtgaagcatacatgaatatcaatagccaaatcgatcaagcggaagaaaggatatcacagattgaagagcaacttaatgaaataaagcatgaagacaatgatagagaaaaaagaatgaaaaggaatgaacaaagcctccaagaaatatgggactacatgaaaagatcaaccttatgtttgattggtgtacctgaaagtgagggggagaatggaaccaagtaggaaaacactgttaggatattatccaggagaacttgcccagcctagcaagacaggccaacattcagaatcgggaaatatagagaacaccacaaagatactcctcaagaagagcaaccccaagacacacaatcgtcagattcaccaaggttgaagtgaaggaaaaaatgttaagagcagtcagagagaaaggtcgggttacccacaaagggaagcccatcagactaacactggatctctctgcagaaaccctacagccagaagagagtgggggccaatattcaacattcttaaagaaaagaattttcaacccagaatttcatatccagccaaactaagcttcataagtgaagaagaaataaaatcctttacagacaagcaaatgctgagcaattttgtttccaccaagcctgctttacaagagctcctgaaggaagcactaaatatggaaaggaaaaatgggtaccagctacagcaaaaacataccaaattgtaaagaccatcgacacgatgaagaaactgcatcaactaatgggcaaaataaccagctagcatcataatgacagaatcaaattcacacataacaatattaaccttaaatgtaaatgggctaaatgccccaattaaaagacaaagactggcagattggatagagtcaagacccattggtatgctgtattcaggagacccatctcacatgcaaagaaaaatatagactcaaaataaagggatggaggaatatttacctagcaaatgaaaagcaaaaaaaagtaggggttgcaatcttagtctctgataaaacagactttaaaccaacaaaaatcaaaagagacaaagaagggcattacataatggtaaagggatcaatgcaacaagaagagctaattatcctaaatatatatgcacccaatacaggagcaccaagcttcatgaagcaagttcttagagacccacaaagagacttagactcccacataataatagtgggagaatttaacaccccactgtcaatattagacagatcaacaaaacagaaaattaacaaggatattcaggagttgaactcagctttggaccaagcagacctaatagacatctacagaactctccaccccaaaacaacagaatatacattcttctcagcacgacatcacacttattctaaaattgaccacataattaaaagtgaaacatgcctcagcaaatgcaaaagaatgtaaatcataacaaacagtctctcagaccacagtgcaatcgaattagaactcaggattaagaaactgagttctacatggaaactacatggaaactgaacaacctgctcctcaatgactatggggtaaataacgaaattaaggcagaaataaagaagatcttttaaaccaatgaaaacaaagacacagtgtaccaaaatctctaggacacaactaaagcagtgtttagagggaaatttatagcactaaatgtccacaggagaaagcaggaaagatctaaagtctacacccagaagcaagagcaaacaaattcaaaaggtagcagaagacaagaaataactaagatcagagcagaactgaaggagatagagacacgaaaaatactttaaaaaaatcagtgaatccaggaactggctttttgaaaagattaacaaaatagaccactagccagactgataaagaagaaaagagagaagaatcaaatagatacaattaaaaaatgataaaggggatatcaccactgatcccacagaaatacaaactaccatcagagactgctataaacacctctatgcaaataaactagaaaatctagaagaaatggataaattcctggacacatacacccccccaaaactaaaccaggaaaaagttgaatccctgaatataccaataacaagttctgaaattgaggcagcaattaatagcctaccaaccaaaaaaatcccaggaccagatggattcagagccaaattctaccagaggtacaaagaggtcctggtaccattccttctgaaacgattccagacaatagaaaaagaggaactcctccctaactcattttaggaggtcagcatcatctggatatcaaaacatggcaaagacacaacaaacaaagaaaatttcaggccaatatccctgatgaacatcgatgtgaaaatcctcaataaaatactggcaaaccaaatccagcagcacatcaaaaagctaatccaccacgttcaagttggcttcatccctgggatgcaaggctggttcaacatatgtaaatcaataaatgcaatttgtcacataaacagaaccaatgacaaaaaaccacatgattatctcaatagatgcagaaaaggccttcgataaaattcaacacctcttcatgctaaaaactcaataaattaggtattgatggaatgtatctcaaaataataagagctatttgtgacaaactcacagccaatatcatatagaatgagcaaaagctggaagcattcccttaaaaactggcacaaagacaaggatgccatccctcaccactcctattcaatttcagtatttttgaaggcatttcacacaatagcaatgttaatatatgtgcaaatttaacaataataagttagtaaggtacaaccacatgtatagaattttggcatagaagattgggaattaccattgctaaaataaagtatagctaagagtataatgtaaattacaaacaactttcttcactacagtataagttaagcttaatggtggaacaaattttaaatagtatctttaagaactttaataaaacaacaaataatacataaaatacattaaaatttacatgttatatattttgaactagtttagtgaaaatatataaacaaatcactggtatactgtgatgtgtgcataattgtgtgtgtgtgtgtgtgtgtgtgtgtgtaagccttcttgtatatccatcattaaatgttaacaaatattttgtctaatccacatattttgacaagatagcataacataataatatgatattttatccatataaagtttcagtttctgaaatacagatgaaaactactatcttgatgtaaatttgagtagaaattcctccatattgagctcttggaaggcttccttctgtggttataatcaatcaatgaagaacattccccaactggagtgcacataactgagatctctacatgtgtaatgaaataacaaccaaatgtacatttgtgattctctatacaagtgtatattcatcaccgtaagtgttacactttaatacccattgtgtgattttcaagactgacttctgagaagacgataaaaaaagaaattgctctaatagaacatttattctggaacaaagtaagggttattggttttttgcttctttttcattcatattctgcagcctttaccaagtcacctctacttttcccaagcctcttgtttttctgtgaggtcctctttatggcgagtagtctagccatagaaggctagtcgaatgtctagcatggcatttgcgatgtcacaggtttcctttctcctctgaagaatctaatgaaagggcaagtcgttctttagtacaaacatttctaatctatttaattataataataaagtgaatcatagtggaataagtgagagacaggactagttggatttcctaggctgactaagaattcataagcctagctggggaaggtgaccacacctacctttaaacatggggcttgtaactcagctcacacctgaccaatcaagtagtaaagaggactcagtaaaatacaaattaggctaaaagcaggaggtaaagaaatagtcaaatcatctatcagctgagagcacagggggagcaacaatgatggggatataaacccaggcatttgagcagggagcggcaacccgctttggatcccctccaatcgcatgggagctctgttttcactctattaaatcttgcaactgtacactcttctggtcagtgttttttacagctctagctgagcttctgcttgcagtccaccactgctgatggttgtcatcgcagacccgcggctgatgtccaccactccagatccggcagggtgtcctctgtgctcctgatccagcgaggcgcccattgccactcccaaccaggctaaaggcttgccattgttgctgcacagctaagtgcccgggctcgtcctgctcgagctgaacactggttgctgggttccacggttctcttctgtgacccacggcttctaatagagctataacactgcatggcccaagattccattccttggaatccgtgaggccaagaaccccaggtcagagaacaaaagacttgctgccatcttgggagcagcctgccccatcttaggagccctaagaacaaagatcgtccagtaacataagcacttttaattcacccatagcttttattataaaatatttaataacataataactttgtatcaacttaaaaagtgcagtgctatacaatttagaaataaactttagtttctcggtttacttaacagttcactctttttaacttaaaatatcctctaaaatctctatgattcagagatgctgagtattatatttcagctggaaagaatttaaaactatttatgaaaatctatttaaataaatttagtaagttcaattgccaaaatgaagaaggttgcaaaataaacagcttagatgcttattctatgaataattttagctttgtcttcaagggctatgttttaaacatcgttttgtggatactcagcaatccgttttgatttagtcatttattggtgattacctcttgattcatcaaagtagaaatcctggttggttctggagtgcttcatttatgcaaaatttggttaagtcaaaaaggaccattcttgcagcgtggttaccatcaaccttattagcctcatatgtttaggaaaattacctgtttcatggctaaaatttttgcaaattattacacccatgtgaaatcatatgaaatatacagtggtatgtgtggggatacagggagacttatctggatcatggtgaccaacatataaatattagctatttcagtgagcctccacagattcaacagatgtattttaacaagttgtactgacattagtattatatataacattatatgtaatatataatgatatatatgatgtcatacatctaaccaaataaaacaaagtaattataaatagagatagagagagggaatgtactcaaaatagaatgaaaagtaggtgtagaaaaaaatcaatgaaatcagaaatctccatttggcaatcatgttagtaataattaactcaaacatctatggatgttatcactagtatacaaaagttggatgaacattgaaatacttgcatagttttaaagtacttccctccagaattcttatcaattataaagagggcaagagtaacatcacagcagagatagctagcacactagtataactgagtgatcaaagtcaatattcccagagatgtgatagattgacaggcaatgataaaaacacagaattacttctgtgatattcctgccaaaaatgcgtaacatgaatctcatcaggaaaaaacatcagataaacccaaatcgaggaatattttacaaaataactggcttatagtcttcaaaaatataaggtcataagaatcgaagaagcattgaggaattatttcctcaatgctaaagagacatgatgatcaatgcaaggagtgatccaggattagatttattttaggatattattgggacatttggcaaatttgaatgggatgtcttggcaaggagttttgtgggactactttgtactgtgcttgtaatttctcataaagtttgaaattatatcaacacacacaaaaaattgaactgatactattattaatatgccaagtgactcctagcctattggaggatatacaaataaaataaaattgtgataaaaatttgggactgagggttatttattgttcaatcctgtgttaggcatatttcttttcttacttaaagtaagtgttccaatttcttgactgaaacacagatacactaattggggagagttagaattgttctgtgattaaccacagtgctgacagtccaaaggaaaatgtattaaattcatttctgccagattttttaatgaattactcatctgcatcacaatgctatccaattgtatgtctattgcacatgaaatatatttgattatcttttatttaaaattattagattccaccatatttagccatataactatgatgacattttctagcattttactgtttcacatttgaagcagtctaagtaagataatatgattcatagtatcattgttctgattatgatgttgagacaagagattttctaacacaaacttaaaatcacctcttgtcacaaatattactttaaatgtgaaaaactgcaattacttttgcactaacctaatataaatgaccttacatcacatgtccagcagttcattacttatcaactttaaaataattgtgaaattgtaaatgattgccatattgctttttttatagactgtctcaggtatagagagatatataacaatttgaaaagacccaatgaaatgtaagtgtgtttattgtacaataagctttaccccatgaaattttactcagatcacaatgaaatgtattttattcaccatttcaggaaaagaaatcaccagtaaaccttctgaatgttatgtttattcaagttcattatggttgaaaagaaaataggtttcctttgtagttgcattttttcaatttcagtaaaacaaaatgagattatattagttgtatgaaaacacctgagttcatgtatacaaatcttgttttcaagattaagtataagtgaaaagttatttaaagaatattattatcttttgcactctaccaggaatggtgaagaaagggatacatagaaatttatttttagaatctgtgctgcacaattcttgttaaagcctaagatttacatttggagaaagaaatctcataatcacaaattctagccatcccttgtattactttttataaattatagtaaacagatgtgaggtatttatttagagaatgtttcagatattgataatgacaaatttggtgtacttttctaaaatttcaaatatagttgtaataatggacttttatgatagatgcaatgctataatttgattggactgtttcatttttccccctggcacataaaagactccattttgttagtcccctatcagctggctgggaccacgtggcaagtagaatatgggcggaagttatatagtgcacttccagttctggcactatgatatcatacacattcttcttatacttattttttagtagcaggaggcaaaagactcagtggaggatggcaagagccaaagtggtcccagaaccaatacatggaaagtatctccttccctattcaccccttgaaggatgaatcagaatgtcctggatgtcctggatggatagagatgtcctgtagattgtctgaccaagaacatccacattgcactttgcatgagtgagaaataaactttaatgatgttaatccattgtgatttgggattgttatagcagctcatgtctgtctaaagcagctttctactttaatcatgaggttacctggaaacaaatggggtatgtttgtacaaaagtacgtcatagtgtataaatttctcattaattgtcaagcatagagtaactgcattttccctcccatttttgcaggtattttgtaaggatgatatacattaaaagcaaagtattctgatgttgatttatttctaaaaggaacttgaatcaacacagatttggccaaggtttctaaccatctatatctatagtagcatgccaccaatgcatataagacatttaaccctagggacaagacattatctgagatccaaattatgaaaatattaggtctaatgtgccaaatattatctttagatattaatacccacataaattatataaagtttaatctgtagaggttgatggttgacaagttcctcacacactgatccttcagagagcaatttaaggtctcttaccacactaacagaatacacaactaatatttacatagtgctgggcagtacagagaacattttccatagattatccagtttactcctcacagccgacctagaaactgagaattccgatcagttctattttacaggttaagaaacacagccaagtggtagttattctgagacagccttgtaaggaacagctttactttattcatcaaagtagcttcaatacttattccagtgtctgttaaatggtaaacaccagaaagaaattctccaaagagctaaataagcaaagaactaaataaacaaggatatctttcatgtcctctgatcctacacccattctgtgtgcccataactcccctagtattttagttgtatatctttcctggggctcttactgtacttttttcttgcatctccaagaaatgtagactatatgccctataatgactcaatgaataacttaattctcctcctaaattgaggaaactggaactcaaatgaactcttggaacttgttctaattttgtactggagcaaccacaaactgacagataaagtatgccagtgcttagcaaacctcactactcaatttcaaccttatgaatattttccaatagtaagagatgaaagtaagaaaaattaaaaacatatctcaatttccaactctaaaaattaatgttcactcctatccaatctaaaaatgttgcctcagcctggctaggaaaaacggtgatctcagtagaaccttcaagattaaaagaacactgtactgtctgagttaatcaataacgttctaaggagaaactttcttagttattcactgttatctaagcagaattcctcatcccattaatgttttaagaatgggatttgaggtttataagtaaaggttataatttaaacgcagctttttaatacatttaacatttagtggcttcctatgcttaaatataggggaaaaactgtagaatgcattacttttccagctttacttatttaggggaaaagaagagaagggatgcatcttcagcaattgggggacatcaaaataattgacattgatggtaaatctagtagctataattgtagactgacacatagggaattgtttctttcagatcaaaaattcaatttcttctgacacatcaaagttattaatttatgttcaatttagtttgaagtctagctttagttttgtattggggtctttttaaaatttacaatttatgaaaggtctgtagccctattctcatccagttaattcaacaggagctacttatgttgtcttattttccatgcattaaagatggatggggatctaccccctacctaaatgttaaactgcaccagaaggtgatgtgtacaattcaaatgaaaagaaactccattgtcagtttgtttctatgtgactggaagataaggtagaaagaacttaaaattcatttgtattttgagaattttacaagagtggctaatttaactctcaagataacatcatatgaaatacatactggttctctctctctttctcaccatctcccttgccccattttagtgtaagtttaggaaagtgaaactttaaaactttaattatgtcaataattactcagagctttgtctgcctgattccaaagtcactagtttatttttttatataagaaaataaggagtttcatcaattagatccctgcactggggggctccttcttataggatgacactgaggaaaatagcacaacctgctttgagagaataactcctcctaaatataactgattaatccttctcttttgaagaccaaaaaagggattaaatcaagattcaatagagaattccgataactatttgcatcttttacttgtccaatctttgatagtatgcttttatctgttattctggatgtaaaacatatcattaaattgtacttacataaaacacgaattgtgacctaaacttcaactaaactttgtctcccatcatctctttaaacagcatttggtgaatataatctgacttgctccttcatggaaactcctatagattgattggcctttctgctctcttataggaaataaacaaatgtatgattctcattgtctcaagaagtctgatttaaggacattaaatgttcagtccaagatgtgaatcaatactatgaatcttatttaatataaaatcttcctcccttttaagataagaacttgattgaatttgaaagactgctgcataagacaagaagatttaagggtcagactgttgggttcagtgacttgcatttattttcctttttgttcactccctcccccaaattaactagctagtatatctgtgcaccagtgttggttgagtgggaccagctacaggtaaggggacaggcaaccttttatttgattgggtctcactatgacttggctgcactctcacagaatctggcaaacgtttctttagaaatctccttcttaggcttctctctcctgcagttatctcactttgaatggaaatatctctgcatctttaataaaagtggttacatacaacactccttagccctaggcacctggtagccccctgcagtttctttttgttgagatttcccacctatctaggcagccttgttggacaggacaggaggtaactgctccccagattactcccccctacatggcatgtgtctgaatcatgagaaaaacacaccttttgtctcaccactctggagtatcagggcagtccagggtactccagggtactaagactctcttggccctgccctgctagaaatccacagaccagaatgatcccaaatgcagatggagccgctgaagctctagagaataccgctgccctttaactgaaagggggagtatcattcccttctccttcctgggagacgagatggaaataatagtattcctttctgcaaaatagcctcccacaatcattcagcttttctgattttttaaatgttagttgaaagagaaagaaatgcttaagagtcatgaaataagtttagatgtgtttttgttgttgttattgttgttgttgttaactatgcatgttgatttgtctgttttggactctcataaaggatactggcacctcaattgaaactcagaccacgagagttaaatttaagcattctattacagatatttgataattttaccatttgtcaagatatcatggctagccataaaaaacatgggtcataagtagaaaaagcagggagtgaacatatctgaagcctgtttcatgctaatgtgaaggataataaggtattagatctcaaacctacatgtaaatattaaaacaggcactatataggccaggcaaacaaataacactctgggtgtatttaataggaagaaatataacgcagagaattagaagcttacatgatattttggaagagctggggaatccaagtcccgagaaaacacctcgcatattatctcaactgctggtagagccaaaatgaataatttgctcatctggaaacagagagcaacatctttcatctaatgtctatagatctcctagcacttacctcccgggagaatgcactaaagaataatggctttctttctttcccttttttttttttcttcaatttttgagatggagtctagctctgtctcccaggctggagttcaatgatgcaatctcagctcactgcaaactccacctcctgggttcaagagattttcctgcctcagcctcccaagtagctgggattacaggtgcccaccatcaaacccagctaatttttgtgtttttagtcgagacggggtttcaccaggtgcctggctgattttgaactcctgagctcaggtgatccacctgccttggcctctgaaagtgctgggattacaggtgtgagccattgcaccagcaggaatgatggctttcaatgcctctcatctcatcagcaaagcctaacttacagcacaactaaaagggattaccctgtgttccccagggaagagtgtaggagggggagaaaatagtgctgggtgaacaacagacattcccacacagagatgaacataacttcagttgctaaaacctagcaaagataaagtggaaaaaattcttaaaaccaagtttggcagtaggagtgaaaaattataaatcatcacggcaacaagtgacctcaaataaacacatgaattaacaaaaactctgtaaaaatgctcccatactttgatatgaaagaacatagaattgagttagttctaagaaagtctgtgtacatgtggatacatagataaaattatctgaaggataattgctgtggatgtcaatctatcatcttcaaaaacatgtgaactgaattaaccaattatcatagtacttttcaattttccagtaaaagtgatcttcctttagagaaagcacattatcagatttatcttttatgaatctgagatatgatgaaggagagtgcattgtaacaggcttaaactcatcttcttttaatttttttatgaaaatatttaatgtgtcattacttatcctgctcaatatgttgacttaaatctttttattttttttttgtactttaagttctgggatacattgtctcagcccaaaatctccttaagctgatgagccacttcagccaagtctcaggatacaaaatcaatgggcaaaaatcacaaatattcctatataccaataatagacaaacagaaagcaaaatcatgagcaaactcccattcacaattgctacaaagagaataaaatacctaggaatacaacttacaagggatctgaaggacctcttcaaggaaaactataaaccactgctcaaagaaataagagaggacacaaacaaatggaaaaacattccatgctcatggataagaagagtcaatatcgtgaaaatggccatactccccagagtaatttacagattcaatgcgattcccaccaagctgctattgagtttcttcacagaattagaaaaaactatgttaactttcatatggaagcaaaaaagagcttgtatagtcaagacaatcctaagcaaaaagaacaaagctggagtcatcgcactacctgacttcaaactatactaaaaggctacagtaaacaaaacagcagagtactggtaccaaaacagatatatagaccaatggaacagaacagaggcctcagaaataacgccacacatctacaaccatctgatctttgacaaacctgacaaaaacaagcaatggggaaaggactccctatttaataagtggtgcggggaaaactagctagccatatgcaggaaactgaaactggaccccttccttacaccttatacaaaaattaactcaagatagattaaagatttaaatgtaagacctaaaaccataacaatcctagaagaaaacctaggcaataccatgtaggacataggcatgggcaaagacttcatgactaaaacaccgaaagcaatggcaacaaaagccaaaattgacaaatgggacctaatcaaactaaagagcttctgcacagcaaaataaactattatcagagtgaacagacaacctacagagggagaaaatttatgcagtctatccatctgacaaagggctaatatccagaatctacaaggaacttaaatttacatgaaaaaaacaaacaaccacatcaaaaagtgggtgaaggatatgaacagacacttttgaaaagaagaaatttatggggccaacaaacacatgaaaaaaattcatcatcactggtcattagacaaatgcaaatcaaaaccacaatgagataccatctcacatctgttagaatggtgatcattaaaaagtcaggaaacaacagatgctggagaggatgtggagaaataggaatgcttttatactgttggtgggagcgtacattacttcaaccattgtggaagatagtgtggctattcctcaaggatctagaactagaattaccaacccagccatcccattactgggtatatacccaaaggattataaatcattcatttaatttttttatactcaccaaacacttcagcaaatatctcaagtaaataaaaaatgttttaacagaaaatgacataaaaacttgctcctgatagcagtgcttgtgtgttagttgcctctctattaactggcaacacatagcagatattctttaaagcataccaaagtaatagcagagacatctaacaacttaacatagtgcacacttcattaactttatcaaggagccactgacatacaccacagtatattctggagtgtttattttacacacgcacacacacacacacacacacacacgcacacaccatgacaaatggcatttaagaaatgagacattctgatttttaaaagctattgccctgctggagaatcgctcgaacccaggaggtggaggttgcagtgagccgagattgcaccattgcactccagcctgggtgacaacagtgaaactccgtattaataataataatgataataaataaaagcaattgccctgaaagcagaatattttgtattctattgttcacaatattaaacccagaaacttgtatttggcaaatgtaaagccaagtgtaacatattatttattgctctcttcagactggtgtagggacttagctttcacttaaaatgctaatagtaccgtttcttcaaacaatgtaaaatgagctttcaagtaaaaaaatgtgtttttcttgggtgactgctatcctttaaaaaaaataaacagggaaatatgtctgcaattgaaaaaaaaacattgattctgacagattttaagcattttttgccaagagctatattttgtatcaatgtgtatgtagaataacaaatattataagagttaaaaaaactattgtttgaagttatgctttttaactgacagcaatttcaaagaacagtaaataagaaaaaaactttctaagcactgtgtgtccttttgttttattctctcattttgctagtttcttctgttcattattagtttccataattcacttctagcaggtcctcattcctctaatcctttgcaaaagtggtgggatttatctctggttattgtgttagtcaggtttctccagaggaatagaaagaaacatctggatgtatgtatatactactcaacttactatgaagttatgtcctgacaaatccgtcatgaattgataatatcatgtcaaaaatacatttaatacacctaacctatgggacatcatagcttagcctagcctatctaaacgtgttcagaacacttagcatacagttaggcaaaatcatgtaacacaaagcgtattttacaaaaaagtgctgaatacctcatgtaatttattgaaaactgtactaaaagtgaaaaacaagatgattgtatggtattttagtccattctcacactgctataaagagctacctgagactgggtaacttatgacgaaaagaggcttaattgattcacagttctcaggctgtacaggaggcatggctgggaggcctcaggaaacttacgatcatggcggaaggtggaggggaagaaagcaggtcataccttggcagagcaggagagagagagagcgaagagggaggtgctacacacagtttaaaaaaccagatctcatgagaactcactcactatcctgaaaacggcaagggagaaatctgcccccatgatccagtcccctcccgccaggcacctcccccaacactgaagatcataattcaacatgagatttgggtggggacatagagccaaactgtatcatatgggtactcccagcatgatttctactgaaagtatattgcttttgcatcattagagtgttgaaaaatcattaaatcaaattgtccataagtccatgttttttgtatgtacgtatgtacgtatttgtttattataaggaattggcccacctggttatggaggctgagaagttcagactcagaagaactgaggatatagctgtccttggtctgaaggtctgagaaccagtagagccaatgatgttccaatctgactcagttccaatctgagtctgagtgtgaaagcaggagaagactaatatcccagatcaaagacagccagatggacaaataattttttattattcagtcttttattgtattcaggccttcaatggattgtaagaggcccacgtgcattggggaagggaacgtgcctaactgtgtctgcttattcaaatgttaatctcatccagaaacagcctcacagaaacatccagatgtttaaccaaatatctcggcagcctacaacccaatcgagtcaacacacaaaattaagtatcacagttacccgtataaaaatacttgcatttgtctgaaagaacattgaatattaaaattaaacttgtcagggggagcctgtcagcctgacagttgactaagtggtgtttgtgaagtaaagcaccttgttgtccctgtagtggataaattgagacccagcattatttatcatgagatatagtatgatgttgccaccttttgtacagtttaactctgcagttgtaatagaattccaaaagttacattccctgtgttctcctcacatctgggagatgaaggaataaaagcattaaatataagtataaggcttctacttatactttaagtataataaaagccttaagcataaggcttttatttgaaggaactgtctgaaacatacatagaatccataataattattactactcacaggcacattgttcagtaaatatttagtgagtgtctattatgttccaaccacaattctagggtctagacatagggtagcccagaatagaaaatggctttgaggagattggagttttgccacacattttctgtaatgaaataagtttaattaaagtgaaaaataccacaactatcatcgtattctgatgagttgacagttgtacagaaggcactaaggtcaaataatatttgaccagtactattttttacaatgtcaggttttaaaataatcctaattccaacagtcttcacttctatatcagggggaatgcagtaaatcacatgtcctcttgagtcctttgaactggatcactatacttttgtctaccacttacaggttacttaattctaaagaccaagggccttttctgtcaccaatacatcacacaaacctggtgttgggagttcagtatccatcatctctctatcttgtgattcaaacctatttaacaatacatgagaaagtttggccctgtgctaaatcaacacttcctgacgggggaataaataaattctggggttgggaagctttgttagcttctacacgacttgtgttgcagtggggactaagagagcattgtcagcaatttgtctgacctggcccactcagatatgactatacttcctcagcttatctgtgaggtgggaaaaatcataccagatagggttatatttacaaccagaaattaaatcacctactattgcatagaatctagaaatggagaaatagcgtctgtggaatagtggtgttagtatgaaatgcagatgggacagtgaaggctacaggcgacgaggcactctatggttacattgaagaagtgaccgcaggactcttgcagttgtcaggactaaaaataacccccactccagaatatttaagcagcacagagaagcttcaaaaccagctctttcatttcataggaagagttccaactagcataaacatctgcctgaagtgatttttaggttatttatgccagtgattgaaatgaaaaaagagtcgactgtaactctgtctacaaacattaaggggtaatgcacagacaattgcttagattatataatttatattcccagttacagataaaatgttgctcctggtttctgctttaaggttcacacatatacatacaggtacatgtatacatttaaattcatatgtgtcaattcaaatatttaaaatataatgtgacttgcaccagtatcccagaatgtcaaccacttgattgatttataatctagttaattctacatgaacaatagtagttgaatttcaaagatgatggcattgttttcacagcagatggcatttttgttttattaagcaccacagttcagactgctatgaatctgaacaatgtatctgcagttacaaatcaacagttatttcagattttttttcaaatgtatttcaggactcttctctggtttcttgatgtttatggggttttgttttgttttgttctgttctgtattgtttttctggccagcttacttatccaatttcatgaagacttctgtatatttactttgtattgacatacagctgagcaatgacaaaaagaggtaaaaacattttaaatatccaccaaagcatgtttttacatattgacaaaaatagggactggagaaataacggcatacagatcagttcgtggcttagatatctgaactgtttctttttactgttaagcaggccgagaataggagagctatttcagaatctttgttcaataaaagggatcatgatccaaatcaaacactgtctcatattttcaacaaagcttcttggcttttacaatgtaagcattaaatacatttatttgtaaggtattttggtgatcattttttggtcatgacacacatatgaactcacatgtagctgacggtcaaaatactagactgtattttttaaaggagcagaggcctcaactgtattgttcacacttattttacagactgatgtatcaaccagggaatgactctcatgcacagttactttctcaatgttcctcagattctacttagagtcaaggttgaaaccaatgggctagagcagtgcttccaaatttttaatatgcatgcaaaccagctgagtatcttgataaaatgcagattctgatttagtaggtattggttggttcatgagagtaggaatttctacaaagttccttggtgatgccaaaatcactgttccatatacttcaagttgtatagtggggatcaaaaaaatatggcagcaataattgaaagctcagcaaaatgccacactttaaaccatagctatattgtccaatattcttttgaacaatgcaatacagaaacctcgacatttacaattacaaatagatgtatattactgttgtttgttttttccaatggagatttatgatgcattgccaaattggcctttaattggttatgctacctacactcattttcccaagatccaattgttaataaatatgcattctgaataactgttacatgaaaacctataaatatttaaatatattataaagcccattacactaaatatgctgtaaggtaaaaatataacaaaaattaactggtgtattataataagagcagacttggttagttgcttgggagtatactccctgaacaattattgcataaaattattacataaaacatttaaaaaattattgctaatcaagatgttgtctattatttctctttgcattttccaaaatatacaactgctatacatttctaagtgaattctgaagcatcttaatcattttgtgaatgtagaaaccattaggcatcacattgaatctagaatttttcctcacattgatagctttacagtcacaatcttccaaatccaccaagggtttgctttgatttcatgttgtgggaacatctatttggtacaatacaggaaataacaaatgtggtagtttgctcttatccatttcttaaaatattttttaccccatattatgttttgctaggagcaaggccaaagtcctcatttgttgcattttggcaatgtgcatttggcaagttcattttattgcttggttatgacaagatgtgttcagaaaagtggtgaagtttcatgctatttgtgcagaattccttctttgttagtggtgtgtgcaaagccatctgttctctgtagagcagcagtgatggcttgtgtaggacagtaagcacttgtcagcgcctggaagatggtcctctgcataaatcattatcctgtctttatgtctcacaagcagtgaaccctttttaggctgcatttctggctgaggttggcatacactgggggaagagtatcagagtcaaggagagttgcttattaaattactcatctcacttttacagaacagctgctaaagcaaactggctaaaatatcttcgttatccacagcatatgtttgaatacagatgctcactcttagcaattcaaagagccgaggctgtgtaggttgataaatgttcagcttttacatacgaagcagaggttaaacggatatgtcaagatgcttagcttgccctgctttacttttagctgaagaataaatggtggcagacttccgactaggctaccatctaatcctagcatgtgaaaaacatagcgaaagtattcatctgttgcttttaataatgtcattggccccattttattgtattagttttttaaatgacaaaaacacctttaaatactattcaaatcaggacaaatcatagagtgatatatttattcatgcaataagatatgcaagcacataaatccctaatataatttcttgtggggcttaccatattggaggcagacagttcagtacaaaggactacttattaaaggctaatgcattaaattatataactgtcacaagatatggcaatttgccttctggaacttgaaatcagaccactagcaaattctcatgggtcactgaatatccatcaaattacagcaacttttagtcatgctttatcttgacagtgtttgtatcagtgacctagagatgaaaggttttataactcattacaaatccccaatcaatcaagtgattctgatttgaggaaagaagcttcattttctttttttatttttagtcaatacctaaattaattcctgagttgattttagccccaaaatgaagggtaaagaaaacctagttttcactttgaactgtttttttccctacatgaagaattggctcagttaaaaattatcattattcttagcaaattaagaaaacattgaaaattatgctggcataggctgtttgggttaaaactctttttcctgataggtctttattaaatgcatttgatggaaggaccttatttttaatacttatggttgcgtaagtattcaaatctacaacaattccctagggcgtatataagcccgtgcagtatttaacatattctttgattagctagatacttaatcattcttatccatatttactgctcaatccacaatatcactgctaatttaaacaaaattctgcatctgatttcttttacacggtcagattcagttcattctcaatttttagtattaagagaaagggcaataaagtaaagctcagggaaagttaaaaataatcaaagactgcattattcttcaaaggaattcttaagccattctttcaaatattgtgagaaattcttttgtgaacactgaatttatcatatgtacaagttactgatattacagaatatgtgggaatgtgacctaatactagcaagaaagatgaacgtagaaaattcgagtgacaaagatccattcttctattaaaatattgaaaactggatcactttcaagaaattgcaacatgaaacaaattgtcacaaagcaggcataagatgtgaagaggcataaagttttatagaattttttaaaaataataataatctgtgtaatttggaaaatgtcacttaaaaacatgaggtgcagaaaagattcttacttttcttattttttagagctgttgagagaattccaggtatgtgcaaagaaagcacttttgatttaaaaaatatgtacaaatgggaagaattttacctattctacatctaccttcattctaagtgttatatggacatattctcaatgattaaatgatggagttggctactcatttcttctactgttcttttctagactagaaaagtaacctcattggctattggcaatgtttgtttagcctgctctgtgaatcacttttgttctaactcttctcttaattcctgaaggctgtttacaatctgtcttctgatgactgaaattttgtgttttatacagttatttatttttcctttaaattatacttacctattatcttataatatttttaaaagaatacaaatacaaaattattttttcttgtattctccgcagtacatcattttttataatgaaaaatattaaatttatgaactatatacactatgtttccatgacaattattttatgattgcaaaaataatgtttctaaaatttactatataatattctgttttacagatacatgataggttcaagtatcacttctccgttgttagagagttttttcttttacttttttatttttgcagttttaaaatagtagaattatgaatgaacatctaagagactaaatcttcatctgcctttgcaaacattacctataggatttcttttaaattagtgtattatttttccacttcattgaatctgtcatttcaaggcttatcaatttaatttagacaaattcaatgtcatttttcaaatcccatcttcactgacttctctggagaattgattccagtcagtgaattgaccttcttgagtctctcaactctttcactttcagtggttaatatttgatctaggcttgcatacttcatttaagcagttgcagaggcaacaacttcctttcaactcaaactctagggttgctctctatgtgaaatgaaagcaaacactatgaatcttagtgtaataaaatattgcctcaaatttttatcattgtggaacttcatctttcctaataattcacctcctggtctctaaatactagcatctagtatattttgtttagccttatgaatatacattcatgattatcctgacactttttttttgtcttctttgtctttcttgattagtttattttccactttttgagggttatctgttaggtgaatcttacagacagaaatgtgcataagtcataaacatacagcttgaggaatgtggcaggcagaataaaagatggtccccaagatccccacgactatgtgccttctcttgagtgtaagcaggacttgtcaacttgaagagattggctcctgtgattacatcattttaaataacaaagctgatattaaggtccaaaatcagttgactttgagtccaaaggagattatttcaggtgagataacctaatcaaattagcctctaaaaacagtccagaccttccctgaagggagagctttgaggtcagggagattttcctactgcccgaaagattcaaagagccagtcttcaaagggcctttgggaattgtgggaggctttttgaacagcaacctccagatgaccgttaacaagaaatcggagacacgaatgccacatctgcaaggaactgaatgctgccaacatccatgtgacctgggaagaggaacctcgagctccagaaaggaacacagtccagccaacaccttgactgcagcaagacctgggaaaaggaccctgagaagtgaaccagctaagccatgcccggactgctggcctcagaaaactggatgataagaaatctatgttgtatcacaccacttagttagtgggatattgttacacagcaataaaagactaatataacacacaggtaacaaacactcagatcagaccacctgagagtttcagcactacaggagcccttctcttgccctttagttgctacacccctagacatattaataatgatcctgcttagtacaacaaaggagttttgcctatttttgaactttatatgattgcaatcatatgctacacactttttatgttaagcttctttcactcagtatttgagatatttcttcattttctgtgtagcaacagttcattcatcctcactgctatatggtatttaattttatgaatacagaacaatttattcatttggcaattgagaggaattttggatgtttctaatttggggttgttgaacatattattctttaactcgtcttgtttgtgaacatattgtgtgtttctgttgtatatctaggattaaaatgcctggatcatagggtttgcacatttccagctttactaatcaatgcccaacaattttccaaaaagtcagaacaatgtacatccttaaatccttttgtcttattgaactgtaggaattctttacacgtgttggatattcttattttattgtatctgcaaatactttctcccaatggctttccttttcattcattcaaagttgaattttggttaatagaagtatcaagttttagtgcagtctgctttacctctttctttcaaatttagctctctttgtgccccactcaaatatcatttgcccattcagtgtctcaaagatattattatataatttttttctaaactctcatttttttgtggtttacatttagataaaaaacccatcaaatactttgaggggagtagtatggtgggaagtagagctcaggaaatgttttattttctgtgtgaatacccgatatatctagccccagttattgacagcatacctccccattatgccacagtgtcaacactctcattgtcagggagctgtttatgtaagggtatggttctgcaatgtattctggtccacttttctacttatgtatgtactatgctaacccaattactatatttttctaataaatgatgtatctgtttatttcttcttcaagatggccttgattatccttggcctttgcaggtctatataaatttagatgggaacttgtttatatacacacacacacacacacacacacacacacacacacacacagtacaaaacttgctggaatattaattgggctatcattgaaactgcttatcaaagcacgcaaaaatgacatgtttatatcattgagttttcccatccctccatttttttgtcatctaattttacccagatatttttaaatttttatttatttttttctttttttaatgttagggagggactaagcagaagtcaaaaacaggtgcttagtcagaaagtaagacttgggcataagagaaataaaaacctcaattgaagatctgatcttcagcttctacagaacaaactccctttagaaatttcaataattagagaagtttctcctatttgtatgttaaagaataagacactgtctgatacaatgacttcagggggttgccatgaccttctaagggttattttctgtttgcatgcaaggactacttcccttcctttctaatttcttagtcagcttgcttagtttcctttgcttttttctttctttatctttcacttttaaagtaagctaacccaaatttcccctgagatctactaaaaatttgatccctgctaccaaattccaccccaccaaccatcaaaaagccttttagtacatagtatgcctgtaaaatttcgtaagaaattcaccctgactccaaaccacccaccagcagggctgcccacctattattttgttattcctggaaatttgacattttttgatgacagaataaggggaaataacatttttaaatatatatagcacgtttgttgctagaatatggaaatacaaataactggtttacttatgtagttttccaggtttctggtgactttattaaactcttcttaattataagtgtttgtcattaaaattctagattttctacaataaattggtgtcatccacaattaattgctatattaactttttctttctaattgtttgcctttgttttcttcatattttatagtatgaattccagtaaaaccttgaacagaagtggtgatggcaggtatgttttttcctcatttctaatttccaaagaatacatgcaatttaaaaaaaatgaattatgtattgtttttctttatttatatgtgtgtgcatatgtgcatgtgtgttttttcacaacttaagagagtttccttctatcccagtttgctaagagtttatgtcataaatatatgttgaatttcatctttaatatttctgtatctatataaaattatacatttttcactattttgttaatgaagggggattgatttttcaaatattaagacatttttataactgaaataagccctagttgatctttatattatcctgtttgagtatagatgcagggaatttttattacagtttaatagtatcaaaccacaaaattacaacaaatttaattttaagctgtgattggcttttatttctgactctggagtggagtaatacctcaatctataaaatagaaaaaatattctaaggggctgggcagaggagattcgatttacacatagaagagcactacagaaagcggaaacaggaaacaattaattagattggtcctttcaaagttattttccttatagggttaaaacagaggagacttccttattatgctgactcagattgactagaatctcctattttttgtgaaaattggatcgtttcaaagttcaatttaactacatggcacttagcacaactgactccattctggtttggtgtggtcagctgggcatagggcaagaggctagtccaaacgatggcctctgataaaccttagcaatggcatatctttttctgctttgtaacttaaatctctctgtgtcctttactttgatttgcagctcttgtaaacagtatatggttgtgtttatttttaatcaaggctgaccatctttgatctttattcttagtatttagttcatatttagatgattaatgatatattttgcattcatgtcttcctttctaatttttttattttacttatccctttttatttctctccccattttttattttgcgctaataaaaattctatttttttatctttacaaactataaaagtatttaaaatgttaagggttaaactagagattatatcctgcatctttgatttattattactttttcaaaatagttttattctgaaatttaaccaatcacttgttaattctcagttgtttgcttttaatacagttttgtttccagaatattttccacttcacaaatgctttaagatttaattatcaatattcaaaattagtaatagccagagaccagaaatcaaactcccctctgagccttccttcagaagtttggaagaaaaataattgttttactagaaaatgatctttggagtaaaagcagggaaagaagggctaggactgacaaagaccaaggccataaaaaggtatttgttttgaaattcagacatagctaattccaactagcttctagaagtttaaaaaaaatcatctaaacaaagaaaacccagagaagggaatcagaaatattttaaaatttttagcttaattgatcctattcttgatacattctgagcttaccacaacagtttcttacttttccttatttataggttatccttttcaacaccctgcatgcactaaatactgcttcttcaataatgtctttgccatttctacttactacaccagtgatattttcaaaatactcatttttctattttcctaaaaataattcatgtgcagtatctactttaattgaattttgtaaatttctaattgcatatatcttatcaatcaatgatataatgtactgtgtcaaaattactaatcatcctgaatttatctagaatgggaattccaaaattttccaacccagaatagtggcaaaggggacattccctctaatagctgtggtggtgatcgtggtggtagatgcttgttttctaaaatttaatattgaataaccggcctcttatcattttagttttacatttttgcgtttaataatatttaaaagatttcctttaaaatgaaaatgtggttgcaaaacaagaactacttactaataatttacaaaatattttgtaataaattacaaaataattttaggatctcacaatatcaaccatactaagatttcaagctgcgttttcagcaaattagggtaaaaatgactcaaaattctaaatgctatcttagattaaaacttgaatacaactgcatttctgtgtcaggtactaattttatctctgaactcctgtccctgactgtgccaattatgtcttttgtacttattatagatctatagaaaaattgcctaatacattcagataacacaaaattcctgtaattttttaaaataaaattgtgtgcactttgcatcttttgtaagttgaggttaaagtatgataatatctgtaattggcatatgaaagcaagtgaattaaagcatttatttctttccaattacaaattaaaaatggcttcccatggaaaaataataaacaatatgatatagcaaaaaaactgaaagttgtattgactgtgaaagaattaaatttgcttttacaggacatttattgtatatttaactgaagatattaaaccaaacacattaagttagaaaagaccacaaggactttaaagaggatgcaaattttagcaaaatatttagatgtaaagcctgtttctttcaacattaataaattgtcatgtttcaaaaactttatttagttttgctctgcaagtattggcacaagtttttcataacttatctaagatataaatatgaattattagtcaaaatgagaattaaaattcatagcattccactgacatgaccaaatactatatttgaatccataacgtaccactgaaatggccaaatattacattttataagactataacttacattgttttttaaaataactatgaaagtaactactatcttaaagggggtatttttactagaatattattacatatcctggtaaagatctccccaacttttttcattatttcccactacaatgttcttccctatgttcacaatataaagaatagcaggtaaatgctaacagatgtcatcaaaaaacaagaaaaagaaaaatttcggccctattgctttaggtaaagctacaaaggtagcatttgattgttattctcatgataaagacattaggacaggctacatattagcaagagaaattatttccatcacataaatctgtgacataaacactatttataaggtgtaggaaattctgcatatgtttaattacttttatcccgaggcctcagttcaccaattgtcttaattttcagcctagacgaattatgcttgtttgttctaaatttcattcagttttgggcaggatgttttgatcttccccagaaaaattaaaaattgaaaaataacacttgtctttctataacagtacaattccaattccttccatttcaatgaatctctgattggaacctcagggtggaatttgcagcatccaattctggatgtctttctcatatatgggatttttttattgttttggagaaaaaaaaatctgggccgggtgcactggctcacaccttaatctcagcactttgggaggccaaggtgggcggatcacctgaggtcaggagtttgagaccagcctggccaacatggtgaaaccccttctctaccaataatataaaacttagccaggcatggtggtgggcgcctgtaatcgcagctaccagggaggctgaggcaggaaaatcgcttgaaactgggaggcagagggtgcagtgagcccagatcgcgccattgcactccagcctgggtgacaagagcaaaactccatctcaaaaacagacagacaaacaaacaaataaatatatatatacacacacgtgcatatacatatacacatatatatacacacacacatatatatacatatatatacacacatatatatatgattacctaacttttacaaacaataaaaaatgaaagtttgcatcttttggcacaagaggtctcgctgtacttaagcttttagagacatctgaatgtattacaaggaaactgtgctttataatagatgaagaggtagtttgttatcctgtaagtttacaaatgtttacagacatgtaaaggttcctttatgcttgagaattcaaagttgtccaaggaaacatatgagttttctgtcttcctttattctaataaaacagggacaagaagaaaaatgtagtataaggatattgaacttattatttttaaagacttttaagagtccataattgtagcatttgcctaatcacaatggccttgtttcttctgcttgtttgttttgcaagtgaataatcaagtaaagatggttattggtctgctcattgtgtaatatattttgtaatttaggacttttaaaaatctttactgagaactataattgtgtatgcatgaactgaaaaccacaaattaagctgctgcttttattttgacgtgacatagaaattcagagtataatatggggactggggcttcgtttctccaatctagagttatcacttatgtctcttctgggataagctatttcatatagaaatcagtttaacaaaagtatctttctgatgtcacttctggagagactcacccacatatgtggggttcttccttcagtcagtaactctgacattattttcctgagtattaaagttcattacaattccaatctctctctctctctgtgtctctctccctctaatttaatctcttcttgtccttatataatataacttagtataatataaaattctctatttaaagtttgtagactttaggaagaccttgtttgaaacctcattctacaattattagataagtgttatagagaaagatctgacttttgttttctcatctgtgaaaccaaaatacaggacatgacatacgagtttgttgtgaggaaggagatgttcaatgcattgtccctagcatgatacctaaaaacaagaactggttaatgaataatgtattcatcattaacctccttgtcttatattttaatcacagaaaacttgttatacctatgttatatggtgtagaaattgtaatgaagtggtataaaatatggtaagagagacacttaaattttttagataaatgttttgcagtaaagcttttcatattcaaagacctagaatctagttttgttatttaatgaatgacacattttccaattaatttgagaagacatcagtttaagcctctaagtagcaagacatcctttaaccctttacgacagaattttgaaattaaagatcagtttgttgctagaatatgttttcccaatttttaaaaagactagaatagtgataaaaagaagaatgaaaaggatttaattacctttattttacactgtagggggtgtgcaaagaactaaaaacatagggaagaagaagtaagaggagttaataaaaatagttttcaaagtaaaattaggggttatgcctcagtcaaagaaaaatttcaaaaatgagtataaaagtgtcagatactaagccctggagaaaataaatttactatcaacaaattccacctgtattttatggatgatcaaactgatgtttagagtttaagttgcttgcacaaagtgataatagtaggtaatagcagagctagatctataactcagatcccttaatatgttgtcctttttttttttttttttggcatgggcaaggacttcatgcctaaaacaccaaaagcaatggcaacaaaagctgaaattgacaaatgggatctaattaaactaaagagcttctgcacagcaaaagaaactaccatcagagtgaacaggcaacccacaaaatgggagaaaattttcgcaacctacttatctgacgaagggctaatatccagaacctacaatgaactcaaacaaatttacaagaaaaaaacaaacaaccccatcaaaaagtgggcgaaggacatgaacagacacttctcaaaagaagacatttatgcagccaaaaaacacatgaaaaaatgctcaccatcactggccatcagagaaatgcaaatcaaaaccacaatgagataccatctcacaccagttagaatggcaatcattaaaaagtcaggaaacaacaggtgctggaggggatgtggagaaataggaacacttttacactgctggtgggactgtaaactagttcaaccattgtggaagacagtgtggcgattcctcagggatctagaactagaaataccatttgacccagccatcccattactgggtatatacccaaaggactataaatcatgctgctataaagacacatgcacacgaatgtttattgcggcacaattcacaatagcaaagacttggaaccaacccaaatgtccaacagtatgttgtcttttttctcctgctccatcatgacactaatagcaaaagccactaaaccagccactcactgctctcggtgctaaaacaacaatccaagttcaagaagtatagactgaaataatacagtatcagtcatttctcaaactatgttccaaataaaagcaggtcctatgaaagccttaatggaaagcaacaagagtggctttggattctaaaatatttagaaaactcaagtattcctctccactacgtgcatttagtgtgttaagggagcagagacatcctaaagtaaataaaaccattcaaattgttatcactccttggttattataattaacacatttttgtttatgttcatgcaaatattgaataaacaaactagacattattctattaaagaatatgctttgaataatggagctctttgtcaatttcccatgatttgcgagaaccaaacaagagctcagattcagagacgattatcatttctctgacttccagtcctaataatgatttccttccacatttagagttttccttgaacccataaactagaatattagggccctagactttaatttaatttactgaaataattttattgcaaatattcatgtgatttattatgaataagatgcaccatcttgaaaccatttaacaagtcaggcttaaagcacctgtgtcgtgatttgtatattatatttagaggcaacattttaaagcaagtctgtggggacttataaatgttagaacctcccagccgagccataaaactaatcttcactgatttttaaaatgtattttctatttgaaccgttagtatatagagtttattttcacatggcacagtttatctgagtattttcgggtgtctctcagatcacagtgtaataattcaacatcacttaaatacagcccctctagtgtactgaaggtgatgttacttttggcttaactagatttttggtgcagtggaataaatcttaaatttaaaatcaggacactgtggttcaagtccttgctaggtcgagcatcaattaatgacttaatgtctcagtttatcatcagttaacgctttacaaactcactaagtaatgagtatcaaacagatttaatatgtaaaagttctaattctccaacaaacataagttggcattttcattataattttgtgtagacatgacccttccatgttctgtgaataccctgagagaaactctaacttttttgagcaacctaatcccatatttattgccagaatctgaagggatactaaaaataccaacaaaaatgagttagaaatgaaacaagaagagtgattaaagcacatttcccaggacacatgcttgaaaagaacaatttcctgttaacacttgtatgtccacctgaaaccaaatgtaactgcatccataagtgctcagtgaatttctgttgaactgggctgtagaaggaatgttgataacaagctttcaaaatactttaaaattaacaacctcagtgacagccttttctttctgatatttactacattcttttaggtttaggttacctgttcctttttcacttatataggtttcattaaaggagtataaaacattataaaagctttatagagtctttgtcattttaaaggaattacatatatacaagtttgatgatttgtatgttactctcttgcctcaccctcctgtgtacctggaattgtgcctggctaatttttgtatttttagtagagacaggatttcaccaagttggccaggatggtctcaaacttctgacctcaagtgatccactcacctaggcctcccaaagtactgggattacaggcatgagccacagtgcccagcagagatcatagatattaaggatctgatcatttctgaggagtcataaagtatcatctccatgtagatagatttattcaaatacaagtaaaatatattttacctagtggaaaaatggcctatgtatacgttgtccaatatgttagtagttatgtgtgattattaaattaaattattgaaaattaaataaaatgtaaaaatcaatttctcagttgcacaaatgacatctcaagcactcaatagctatatatggctagtggctactgtattggagaggatcaattatagaacagttctgtcactgcagaaagctctattagatagtggtggtcttgttagaaaaaaacatacatcactttcatttagtaatcaggtggtagattctaatattctagtatagaaacagttttaaaatttttatcatttaaatttctactcattcattaatactatacattgtgcattgtggtggagaaaaggaagagaaaagtgggacgtagtgatattatgatatataaatccaataacctccattcatctttatgcgcatgaaataaagtatgtgttgtatacctgggatactaataaaattttctaaaaatctatggcttttgttaaaaaaatatctagagaagtggttaggacaatactgtcacttaataaacacttctgtctctttaatttttaaaacaaacaaaaaaaaccaataaatgtaatccatcacataaacagaaccaatgacaaaaaccacatgattatctcaatagatgcagaaaaggcctttgataaaattcaacatcacttcatgctgaaaactctcaataaactaggtatttatggaacatatctcagaataataagagctatttatgacaaacccattggcaatatcatactgaatgggcaaaagctggaagcattccttttgaaaatcagcaccagataaggatgccctctctcacaactcctattcaacatagtattggaatttctggccagggcaatcaggcaacagaaagaaataaagagtattcaaataggaagagaggaagtcaaattgtctctgtttgcagatgacatcattgtatatttagaaaaaccaattgtctcatccccaaaactccctaagctgataaacaacttcagcaaagtctcaggatacaaaatcaatgtgcaaaaatcacaagcattcctatacaccaatattagaaaaacagagagccaaatcatgagtgaactctcattcacaattgctacaaagaaaataaaatacctaggaatccaactgacaaggcatgatgtgaaggaccttttcaaggagaactataaaccactgctcaaggaaataagagcagacagaaacaaaggaaaaacattccatgctcatggataggaagaatcaatactgtgaaaatggccatactccccaaaataatttgtatattcaatgttattcgcgtcaagctgccagtgactttctttgcagaatggtaaaaaactactttaaatttcatatgaaatgaaaaaagagcctgtatagccaagacaatcctaaacaaaaagaccaaagctggaggcatcatgctacctgacttcaaactatactacaaggctacagtaaccaaaacagcaaggtactggtaccaaaacagatatatagaccaatggaacaaaatagagacctcagaaataacatttacatcttcaaccatctgatcttcaacaaacctgacaaaagcaagcaatggggaaaggagtccctatttaataaatggggttggaaaaactggctagccatatgcagaaaacagaaactggatcccttccttaacaccttatacaaaattaactcaagatggattaaagatttaaacataagacctaaagccataaaaaccctagaagaaaacgtaggcaatacctttcaggacataggcatgggcaaagacttcataactaaaacaccaaaagcaatggcaacaaaagccaaaattgaccagtgggatctaatcacactaaagagcttctgcacagcaaaagaaactatcatcaggccaggcatggtggctcacacctataatcccagcactttgggaggctgaggtgggtggatcacaaggtcaggggttcaagacaagcctgaccaacaaggtgaaaccccgtctctactaaaaatacaaaaaaattagctggtcatggtggtgggcgcctgtaatcccagctactcaggaggctgaggcaggagaattgcttgaacccgggaggcagaggttgcagtgagccgagattgcaccactgcactccagcctgggcgacagaccaagactctgtctcaaaaaaaaaagagaaagaaactatcatcagaatcatcagaatgaacaggcaacctatagaatgggagaaaatttttgcaagctacccatttgacaaaggtctaatatccagaatctacaaggaacttaaacaaatttacaagaaaaaacaaccacatccaaaattgtatgaaggatatgaacagacacctctcaaaagaaggcatttatgaggacaacaaacatctgaaaaaaagctcatcatcactggtcattaaagaaatacaaatcaaaactacaatgagataatatctcacaccatttaaaatggcacttattaaaaagtcaggaaacaacagatgctggtgaggctggggagaaatagaaatgcttttacattgttggtgggagtgtaattagttcaaccattttcgaagacagtatggcaattcctcaaggatctagaaccagaaataccattcacccagcaatcccattactgggtatatgcccaaaggattataaatcattctactataaagacatatgcacatctatgtttattgaagcactatttacaatagcaaaggtttggaaccaacccaaatgctcatcaatgatagcctggataaagaaaatgtggcacatatataccatggaatactatgcagccataaaaaagtatgagttcatttcctttgcagggacatggatgaagctggaagccatcattcccagcaaacacaggaacagaaaaccaaacaccgcatgttctcactcataagtgagtgttgaacaatgagaacacatggacacagggaggggaacattacacaccggggcctgtcagtgggtggggtcaggggagggagagcattaggacaaatacctaatgcatatggggtttaaaacctagatgacaggttcataggtgcagcaaaccaccatggcacatgtatacctatgcaacaaacctgcacgttctgcacatgtatcccagaacttaaagtgaaaaagaaaaaatgaaaacgaaatgcccttaagatggcatgaaaaaaataaaaacaatgaaactaatatcacatacatgacagtataaggatcaaatattcattctataaaagtgcttttcttctatgtgatttgctacattttcatactgtttgtgcattaagcttatggttagaaaaacaaaataatttaaactaatgtaaaaggattatgtattattcttactaaaattgatttaatgacctaaaacatccttctttacttgagatttttctttattagtttcagcattttatctaaacctagtatctgctccattattaaactgcttgatgtagcttatatctaactacctaaagacactttcatacttagaaattctcttttcaaaatgcaagacactgaggttgtacagtaatttcaatctggctgctcattgccacatttatgaagatttcagcactatttttattagtatgtcctggcctgctaaaatagctaggcaaatttttcttgatatttgagatgatgacatgctttccgttctcctggtttaggtgaaaaagtaaagggcagtagaaaaggcatagcgattatcctgttgtctgtatgcgcgcacacacacacattacatatgtaaaatatttttttcttttttatgtttaatgtgttacaaccttggaggactgaatgtatttttctcctgtcttgtcagtgtctagttatcctagtgttattacaatgaataacacttaagtcactagcctattgaaatcatcgttcaacatagttttaacaaatccttgaaaaatagtgaccttaatcgttggatgaattgctaactttaaactcaaattgttttcataagaacacttgctgggtttgttgagtgttctgctttcacatcactggcatcttaactttctgcaattggaaattatgtgggtaggtgatgcatcgcccttgtcacctctatccacactgaggtttttcttctcatgttatcatttgtcttcattcttcaagacagttctttatccaagtagctgtctttcacttctctccataacggttgaccttgtagatttagttttcaatctggtcatttaggaaacgattcgtactgtaggaaaattatgtccccaattttctctgacaactgtattattttatcaagcaaagcactatcaggtttgtcagatgtgcccgtcttcctgtgattcaggctgactttctttaaacgatttatcactctctgaatgatctgtgttctcaactctgatcagcatttcctgttattttcagtgtacctaaattctgacagaaaataaagctttcaatttctttctaattgaaaatactagatttttctcaaataatgtgtttctcatatctcttgaatttgttattggaataactctatgttttgttggcaaagggcttcagagtggataacacggtttcacgtgcattatctcattgagatttacactttttatatgggttacaagacagtagtaaaggaggtcttcagttttgttaaaagatgattttcaaaaaaagtcaaaataattttcagaaaaaaatacgtaaaatgaacccgtgttaaaaatgttattcaatttaatgaagacatcactcttatattttggttaacttaaacacttatatttggttcaaaagagcaaccaaaaggtagaaacatttatagattgggaatattgaaatgaatttgtacataaaggcaaagttgagttttccacaaagtggaagagaaaattcgaacctcaactagaatcagcagaatttgcatgttaactggctgtgtacaaattagttataaaagagctcaaagacgcgaaaaactagaatcagatgactcagaaaggtaagctgtaggttattcaaaaaaatataaaaaacagtttttataaattaaaaagttgttctacagtttttataaattaaagagcaatatttgataataatagtaactttcaattacaggcatatgggtattaatcaaaacaactactaatatagagtgaattaaatttattgtaagtttttaggtccaaataaggtataaaacagcctataagttttattttattttattttttcatgaacagaattcatgtccacaatgcgagtctagaaaatgctcaaggtaagagctttataaatcatatgctatggcatcctgatgtgttccaaataggcaaacaggagggccatgagaaattggtacccagaatctacaggacaccctggtagagcctaggggcaggcaaagatgataggctggtcaccactaataacaagcaatctactttgggaatcagagtgactcaaaagaagcaaaatctgaggttgcatcccacggaccttgcaggtgatgcatacgacagtgtgtgcctgtggctaagaacttgcacaatgcttgcatctttttcagcagctagttgcaacacttgactctaccctttataaataagaggcctatggagctgtggaggagaagctggggcccaggtgcctaggcagtacagtacggaactaaaggtacagagggtaggagttggggatagaggtgggaagacagaagggctaaaacaaatggtgacctgaagtctgtgtcttcatatatgtaagacttctcttcatttgcagctattatatttttaagtggtacacagtttagcatcatgattatttccttattacaacatactcgttgttccttgttaattgcaaagttttgatttgtaaaagtttgctttgatttgaaaatacttcaagttacataaaacattcaaatatgtctttagtgtagaagaaaaagggaaaagctatgaattgtgtgaatataattacaaatattttacatggttcaaaaatatttcttgtcaataggaattgttaaatcacttcactgatatatgtccacttcacgtgacattattagatctgattcttggatcaatgagggtctgatacatacattcatctgttatgaaaacctattacttttattagtatacaccatggaattatagtgaagagtatagacagaatctttcgtctataatttatatctgtgtgacccttggcaaaacatttaatatttataagacagatttctcatatgtaaaatgagaattaaaataatacctgctttataaatttgttatgacaattgaataagtaatccatgtaaagcacaaggtaaagcttgaaaaactctttgctctatgaattagatatttcatttacttacttattttgtaaatctcatctgcttcagggacatgaaggagaagatagcattttacagactcctatgaaaggacaccttttaatctctctccccattacacttaggtgagtagttgatatgaagatggacaaaattaaaatttaaaaatgtttgaatagctatttgacaatcatgatatgtaatacactcactataattaaaaaacacactctgtaataaactgccaaaatgtttattatgaataataaaaagtaacagagacactgatcaattcctattgctaccaaatctttctgaagagggaaatgacaaatttctgaaatctcttcacttctaatgctttaaaattgagctttaaaaaaaagttttggctgggtgatgtggctcacatctgtaatcccagcactttgggaagatgaggcaggagaatctcttgacctcaggagttcaagtttacagtgagctgtgatcatgctactgcactccagcttggaggtataattggtacacaaggaaccaaacctatcaatgtgtacaatttgatgagtttgaacatatgtaaacacccatgatatcattaccacagtcaaggtaacagacatacacaaacctcccaatgtttccttttatctctttgcttgggtgtgtgtgtgttaagaacacttaatatgagatctaatttcctaacaaattacgacgtgcatagtaccaaactgttaactataagtgctgtttatgcagcagatctctaaaactcatttgtccagcataactaagactttataccctttgaataataacccctcatttttcccacttgccagcccctgcaactgctgttgcttcaatgagtttgactattttaaatatcacatataagtagaatcaagcaatattaagtgtgggcaaggtgaggtaacagagaaattggaactcttgtagaacgttggtgatgggaatgtaaaatggtgcagttgctatgaaaacagtatgaaaattcctcaaaatatttaaaataaaatgactatgtattccagcaatcccacttctaggtatctatctgaaagaattaagatttggactgaaagagataatctgcacttccatattcattccagaacttttcacaatagccaagatttagaaacaaaccaactgtccatctgcagataaatggatttttaaaaaatgtggtatatacataaaatggaatattattcagtttttaaaaagaaggaaatccagccatttgccccaacgtggatgaaactgaaggatatttgctaaataaactgagcttggaaaacatacgttttttctgcctaaataacaatggaatagtgaaacctctaaataatctaagggagttcagtccaccctcatcctccattctttttacaagatggtgaaaaaggacctgctcaactgtcagacgtagaacattgttcagaaagacatttgctttagcatctgcctttgaaacactgaaggatccccaaactcattgtcaaagaaaaaaaaaaaaaacagaaagggagtttatactgtttcccactgtgaaaacatttcccaaataaaatattaaacacttgagtgtcattatggattaatctttaatgacatttttctgagcactgtgatgacctggaatgaatctgtaataacatgacctggtgatcccataggcatgggacctttgagatctacacaagattaataaccagaggatggtcccaaggggtctatcaaaatatccattacagcgattatttgatacccaatgtaatactgcatttttaacaaataatgtccagtgtattttgtgtttcccatgagatctgtgtccacactgttaggaagtagactttaatactatgaattaaactaacagtctttatttgcaatcctgttatccatttgaaactcacacgtaaactttctcacacaggggagaaatagacttttgtattaaagattcctttaatcttggttgatttttattaaaaatgtcttcatgtctgcccttaacaattttcattgttctatgcactttttttgagttttcaaatttgatattttaatgaatctcaactgttcttaaaatagtctcattacttaactttttttgcttttatatttacttatatgctgctgctcttttgaatttagtctatttcctaggtagcattcataactcatggccacatacttgcttctgaatgaaatgttttcatttttactttacttccaaaatgaaatgttttcatttttactttatttcttgcaacccacatgctcttttctccttttggcttattcaccttattatttttctatgagttgccatgtggttgtgataaagttcaatttctttactttttaattttgctggtaatttaccacttaattcaaacatatcttgagcagttatggtctcatatacctaaatttgctttatattttttcttctggtatctgagcaatttaaaaacaactaagattttcttatttccatgagaaataaacatttaggaaatgtgtataattatcaccatattagtttgcatgccaaagaagtgagagctttgggtatgaaaactataatcataaaaagatacagaaataataaaactaataataataataataaagcatataaactccatttttcagactttgagattagcatgcttcatttgtatagagttttatatataaagattgctgtgtcaaactcaattttattgtttaaactctttagttttttatgtttatatcactcgttctgatgttttctaaaccactgacatatatacacacacacatatatatatatttaagtataaatatttacccttaagttcactcatcagttattctgcttccattacattctcatataaatgcagatcttgtttctacaactctgtatttttcagacatgtaaaatgcccattcataaccagcttcaataactaggttgtaggataaaacacctcaggaaaacaccatttatattagatgttccatcaaatgtctacatctgtgcccatcattttagggtaaaaaaaaatacttcaatagaaagcagataatattcagtaactagtattggaagattttagacttatctttactattatctacctattccaaatatgtctatgacataaagcacctggagatgaatatttaatatggtttcaaattcccatcaacgccactaaacaactgacctaactaaactaaccaaaatattgacattttctaacaattggtctagattgtatttggtacaccttcattatccttttttaagtttagttttatatgtatatgtatcttttcttctgaattagaattgttacatactgagatatagaaatacttaagaaatattagctgtggctttcttgctgggataggagggacagaaaatgactgaagaagtttctgatattggaaactatttcacaaagattaatgtgtatttatgtgtattatgtaccacataatacacataaatacacaaagataaatgtgtattatgtaccacataaaatgtggtataaaatttcataatatgtaggaaacatacaatagttattgaaaatagctccacttgaaaagtacaaataaagaaaagaaactatgctagattaattttttcaatttgcaaatgtgaagctaaatttattttagcaataaagatttttatattattaatcactttggattacctatcttgtggctacattctatcccttttgctaaacacacttttactgaatactgaattttggattaattgcttatcagtcaaaacaattgaaaaggaatatgatctattacatggagagattaattagctatttcctgacacaccattttgtgtaggcattttggaatgcataataaatgccacagaaaaatcgaagagagaacaaaaagctacatttagtttctatatcatgacttcacagtgttaatgctgcaattaattcagtgttaatgacaatgagagtttttttggtgtgctcttccccccacatgtgagaagctggctaaactcttgcaagattgggagtgaaggggatctatttcaaaatcaggccttttccagttatccaggcataaatagttctaggatcttcattatgaaagaaaacacagaaacccaatttttacggactgcagtggcttatgcaatcagcagtcactagccaagcatgcttcccctaatgtttttctgcccatggcaaccaccttttctgtctggatgatcgagagtacagaagcctgaaggggacatgtcctagcacagcctgggtgtggggaattggacagacccgtccctttgctataattgaatgccacatctctaaatcagtatgtaacaaatgtaccattcgaataccatgaagacacagaaacttctcatcactaggagtttgtcacatattttgaaaagtggttacagtgtacaaataccatttgcaatgagattttaaaaataggttattatcaaaataatgttcaaattatggtgaccctcactgcttgatacaggcagctcacaggcttttgaaactgttttctgtttctttaagcatgcactctggttaatataagaaaacgataattcatttcaaaaataaaaggcatactttttattgctgctttcttgcatccaaattatggtaaataaatatgatattcttcagcacactgcaactattatcagtaattttctgtatgtattgcatagtcgctctgtgcttcagactttttccagctaatatttaagaggatgacagtatttcgttttggctatgtttccaacactcatgatacatatttattcatcaagtatttaaattaaactaagacatatgctgccaacagaaactagtaattctttttgtcaagtctgtgacatgtttttgagcattcagttaatatttttatggatacagtgttaaaccctaaacaagtcatcataaaatgcttgtgaatttagactggatatactgggaaatgtacttcgagctgagaaaggaatgctcagatgccaaactggctgctgagctaaaagtggaaagcagtgctagaaccatatatgtcactgtggtttgctaaatctcaaatcccaggtttggacttttctatccttctccaagtcagtagaatagaaagggaaacatcattgatacgcttttagttttggttttggtctgtgtttattacaatgaaaagagaaggcccagaatccaggcagcactgtttcatgggaagggccgtgggaggccgaggcaagcgtagaacatggcaagtggactgtagctacacatctaaacagcaactcgttagggtttaaggtaacacagatgtgtgcagcagagtataaatggatttaatatctcaataattgacaaaaacatacttcttattcccttactaccgaggaaatggtcatgtaaaacacatttcttactgatctgtaatatcttctttggtatatcaatgagctcaataaaatagccccatctatgtatctatccatctatccatcacctaatctgtcatctatctatctaactgctgataaaagttcgatacactatgttggagggaaaatttgtaaagatgaacgctatttccagtacaactagagtattcatgtgtaaaaattttttacatatatcttatatttattcagtggctattatgaaatatagtatgccaaatgtttcatataaaccatccattacattgagaaaacagtgtcgtgagatacgtaacatttttagaatttacaaacaaggaaattgagaataaaaacggtctaggaaatgtcatcaaaatcacatgattaataggtattaccagtatatatgatgatttcttactctttgttattgttgttgttgttgtttgttgtttttttgagatggagtttcactcttgttgcccaggctggagtgcaatggtgtgatctcggctcactgcagatgaactttatcaatggacagaatgcacagaaggaaaaataaattaatgaaaagggtcagaaatatgtattataattaggaggaaaaaggacaaaattcattcttgaaaggtgtattccaataatattaagtttaaaaatcacctgcaaaattttttaaattaggatttaacaacagtaattaaaacgtattcgggaatttgaaagaatgattttcaaaaggaattgtgagggtctcatatctggagtggttgtaaataaaccacagttatttttttccatcactatgaaacacattatccatttgccttgacagaatatactaaaaaaaattcaaagacaaaatatgaaaaaggaagggcattaaataccaatggcaaatagaacataattttcatatgattatatgaattggctttagaattatttgaaaaacatgcaatcaatagcacttttaagaagctgaaaaagggaatttagaaattccttttgttgttcaaaggctgaagctccagatgtttgaactgcagccagtaagccccaccaaacacaagctctccctttcttttgcctgatgtgctggtttcaaacagacaacttgtatcactaaatcatgagtatggtgaaatgttggcatctctattttgttattgctgaagtccaagtgaaaaagcgaattttcttagctgtagatattttttgcatgcattaattttagggaaaaaataaagtctagctggtaaagaggaagaaatggaaaaggggcttacagaagggctttgtcatttataaaataataaagtaaaatgataaactgtgaatactgtaaactaatatgttttttaaaatgggggagggaaatagaccatgtgctccaagtacactgaggttcagatcttaaaggattcacagtataccttgtattcattttctcactcaagattccaagtagttttagaaattgctcatgcctttgcataaaaacattcaaagtaatttaagaaattgcagtattaaatagtgaaaaatatatgttgcagcctattttttataaacttcagtaaatcatttctttcttccattcttagctgtgttgggctgactctgaatattaaatctacttatgaataggatgactggtgatgtcactttagctcttgagaacagggttaggtaacttgggctccctctggtgtcggcctcgttcctttttcagtagctaaaagaaatagaaaaaaatgatcatcattttaaaaaaccaacttctgtaatataaactatcataaaatagtaagaataacttacatttttatactacctctcataaaaagtgagcatgacttcaagttaatttgaaacaaggaaatgtatattcttatgatgaatgtttaatatccagagactgttttttcttggaaataagaacataagataaaagaaatgtagaaatgtcctttagtaattttgccataaaggtatgtaaactccacagaaacatgttgcttattgctaaaaaaaaacaaaaacaaaatacaaaacaaaaacttaactgcttatactgatatttaatattaagatgagctaattggcatcactattaactatatttaatcaaaatgctagtacaaaaaccacaccatgtttaaccatgaatacttgtaccttacaaataaacaaaactttcatttaagtgtagagataattttaataaatgctagataaaatcactagttttacaaggtttataaaccttattaaaggctgttatgtgatttagaaaagcaaaaaaaaaaaagaggtaacagtttaaaactacaaggaaaacactctatttttggatactttaccttgtttatttcactaaactctatggtttgaatgtgtgttagaatttacaaacaaggaggccgggcgcagtggttcaagcctgtaatcccagaactttggcaggctgaggcaggcagatcacgaggtcaggagttcaagaccagcctgactaatatggtgaaaccccgtctctactgaaaatacaaaaattagctgggtgtggtggcgcacgcctgtagtcccagctactgggaggcggaggttgcagtgagccaagatcgcgccactgcactccaacctgggagacagagtgggactccgtctcaaaaaaaaaaaaggaatttacaacacagaaatgtgtttaaatttaaatttacatgactttgttatatttatgctatggaattagttctgaacatttcaacagcaatttgtattctaagacttaggcatggaaatacattttactaaatatttatttttattatttttcatagtgccacgtcgtaggatataaagtttcattactttcattgcttctataagccatatgactatgcatgtaatattcaataaatgtttattatttatatttaaaaggtatacattattagaagtttctgctttgtgtatacttatataattacttatatatgaatatacgcacccatataaatataaattaaatatagctatatgcttatttaaatgacatgtttatataaattagttacatttatacaaattatgtatatttatacagatatatacattataaatatttgtataaatgatatatgagataaataaaataatactggccactgaaatttacctatatgtgattatcatccatgtagtgttatttttaaagtaaataaaattagataaaatattttacagaacaaaatttaattatttaaatacaaagtataattgtctataactaatataattatcttttgagaatcaggccatcattagcacacatatactccaacttgaaagtagaaagtaaatttatagaatactaaaaagaaaacacagaaaagataatgattagaacatgacaaagtacatgatgaagaaataagtaaataatttgggaatattttaccgagagacaagacatgctagcataggggtagtttcataatggtatttatttatttatttatttatttatttatttattcattcatcagtttaaaaatatgtattgagcacctattatgcaatacacatattttctgttgctacatgattttataatgttatctacttcattacatgctgatagaaaggaagcatgaaacattcattttatttctcaagaaagaaaacaaacaaaaagcagaaatatattttaaaaactaaaatatacttgttagtataggtatgtaagcagtgctttagttctgcctggtgtagttaaatctggaaagcttaatcaggcaggaactgttactgggttaaaacagacatgggaacaatttcaggatttggcaagaatgagaaggtcacagttggcaactatgacacagaaccagcatcggcgagttgagtaccaagtgtgcattctaccgaaagttaagaaaggggatgttagatcattaagaactgcaggcttcataatagccttgagctaaaatacagctgtaggctacttgtggagattttagtaataaggaagaatcgttttttttctttgtttcacagatactaatttcctaaacatggagttagagtttaggggctagaaatcagcctcaaggacagagtggagtagtgcacagccttttgagtgaaaaaaaaaaaaatggtattcagttactgatattggagcacagattaatgcagagaaagcagcaagttaacttggaacttgacagccgcctgtcttactattagctacagcagctcattatcttcctctgcatttaggaatggagactgatcagaaaggtatagatccaaaagcagaagggaagggaagcagggagtgtgttgacagatgtggcgtattaaacatacattgcaaatttcaggtttttattaagatacaatgggcagagtatctcaatatattagtagatcataaattattctcacctattgctatctgacttgccctttgcaagtattcaaatattttgtccccactgaaattttaatttgtgacctcccccttttctcagtcatggtggtagatgtaatctgaacgtctttctacaaaactatagcaaaccacctaactagattgataagtagatacacatacacacttgattaatcagaggagacatgcaatgtattcatatgtgtatgtccatgaatacttataagtgaatacattctattatttcataattatataataatggaaaccttacttcattatcatattaaaaatgtagaaaacttttctgaaaaaagggtcaaacatacccaaaagtttgatcatataggaataaaccacaatcctttaaccaaggtttggaaaaatttaaaattaaaaaaaaaaagataacaacaacactcgaaaaaaagaaaatctgaacttgtgctaattcttacaaagtatgcctggccaagacaggaatctaaacattcatagttaatgttattattatagtttattgttgttttaagaaactcggttgacaaaaacaaaagggatgtcttttcttcctttgagaatacggggtattatctctggaaaaaatacaagtttttctcggtaagaagtgtttgcttcttacgttaactattgagaaattcatctccagatttgtcttttgagaagaataaactagagtttattccctcttccaatgactccagccagcatctttctatagggatagcagcacgtatttggcaaagaggaatttttttttttttttttttttgaggcggggtctcgctctgtcgcccaggctggagtgcagtggcgccatctcggctcactgcaagctccgcctcccgggttcccgccattctcctgtctcagcctcccgagtagctgggactacaggcgcccgccaccgcgcccggctaattttttttttttttttttgtattttttagtagagacggggtttcaccgtgttatccaagataatcttgatctcctgacctcgtgatccgcccgcctcggcctcccaaagctctgggattacaggcgtaatatctagcataggaggaatcctgaagtgctccacatgacagggagattatactgagagagctgggaaaaaaagagtgttttggaatgcagttgagcccaatggcaatgccacttaaaaaaaaaaaaaaaaaaaaaaaaaaaaaaaaaaaaaaaaagcctagttctaaaacttgtacccttttatgatacaaaaagccattctgttagatagagctgcaaacgccaatttctacacattgtcctgctcacttgaaatccatctgacactgcagacggatttaaggtacctggactcaagttttgcatgtttttagactaggttacacagagcattaggttctcaggtaaggaaaagaaggtcatctttcagggattacagataagatctttttgccttcacgctgggttaccatgctgaatcaccaaagggtatttcagcaaagacaagaaaggagatcagcttaataatattactcccgtctccagaagtaagagacaggtgtacagaaataggtttctctgactgttagaaaaccagtatttggacagaaagaaaaagactttacaactcttcagcccttttagatgttgacataaatatggaactcgttctttgtttccctgaaagagcatatattataaattataaaatacatgatttttaattgtattgtatttagtagctctgtctgtcatgagagtaatgccacgtatttctagcttacagtttattttttatctagtcaaaaactgacttctttttataagagacaaacacacttcaaggtggaagatttcaatataaacactaacatgacattttctctaagttaaaaaccatcaaaaaagagtaagataacatgtgttaaagttcaacacatcttcagatattattcaagtgacggcatgtccatttagaagaggacaagcggccaggtgcggtggctcacgcctgtaatcccagcacattgggaggccaaggtgggtggatcacctgaggtcagggagttcgagaccagcgaccaacatggagaaaccccgtctctactaaaaatacaaattagccgggtgtggtggcgcatggctgtaatcccagctacttaggaggctgaggcagtagaataatcacttgaacctggaaggcggaggttgcggtgagcggagatcgcaacattgcactccagcctgagcaacaagagcaaaattctgccaaaaaaaaaaaaaaagaggacaagcataactccaccatatggatagagtatggaggcaaacatgtgagcatcattacatcattattattataattatttcttatttctagggtcatgagaaaaggtccaacaagttgtagcaaacgaatgataagccatgaggcattttttattttgaagtagataaactctctttatgcaatcctaaagagtcacatttatataccaccccaaaccataaatcatgcacaattgtttgttttaaagagttacctataactaggactcagcacaaattatagagaagctttatcatacacagcaaaaagaaaaagaaaaaaatttaaagaatagctttgtgtgtgtatcatcaccagggttttaaaattataacatttcatttgcattatggttttattgaaaataagatccactggacacaataatattactttgtagatccaagtactatgctctgaatccaccatctaaagaaagaaatattgaaatgcttgttaatgtatctaatgctactgtcattctcatatttcacatatgagtgaatggtgtggaggatcaaatacatttgagccttggctgagcaacagaatccccagtgaggaaaaatacaggatagaaattgtttcaaaaaagtgttcaaaataagaaaggggaaaatacaggcataggaacgtcataacaaaataccccattttctaacaaataactgaatggtatccattgaccaataatatcattaaattaatttccgtctttgagagcagtatttgtttggcctatcacctatctgaataaatatggacagagataagttcaattttttccctttatttttagtcgacacataataatttataatttaatcccataataatttatgggatacagagtgatatttcaatacatgtattcaatgtgtaatgatcaaatcaggataattagcatatccatcatctcaaacatttatcatttctttgtgttgggaataatcaaaaattctcttctagctttagaagaatccacaatacacaatagattatttttaactatatttaccctacagtgctatggacactagaacttatttcttttacctagctataattttgtattctccctattggctctctcacccaccattcccagtctctaataaccataattttatgctctccttctataagctcaactttttaagctcccatttatgagtgagaagatgcagcatttctctttctgacctgacttattttgtttaacataatatcctccagtgttgtccatattgccataaatgacaggattttattctttgttatggccgaatgtattctattgtatataatacttttccttttccatttatctgttaatgaacattaatgttgattctgtatctttgctattgtgaatagtgctgccataagcatggggttgcaggtatctattcagtgtagtgattttctttcctttggataaacatccagtagtgggatggctagattatatggtaatacagttgtagttttttgataaaactccatactgtttttcataataacttcactaattgacattcctgtcaatggtgtgtaagagttcccttttttcttcatccttgccagcacttattgctttttggctttttgttaatagccatcttaactgaaggatgacgatattgcattgtgattttcaattgcatctccctgatgattagtgctgttgagaatttttttcatatacttgtttgccatttctatgccttttttgagaagtgtctattccgatactttgcccatttttaaagtcaaattattagattttttatattgttgagttgtttgacttctttgcatattttggatattactctcttgtcaaacatacatattacaaatatttctcccattctacagaatgtcttttcatgatgttgatgttttcatcaatgccatgttgttcttgttactatagctttgtagcatattttgaacttagctactatgatccttccagctttgttcttttgttaagtactgccttggttattcagggtcttttgcagttgtatacaaattttagcagttttcctatttctctaaagattgtcactggtattttccttactttgtgcactatggtcattttaacaatattaattattccaatccatgagcatcagatgtcttttaatttatttgtaccttcttcaatttcttttatcagtttttttttagttttcgtggtagacacctttcacattcttaattaaatttattcctaagtatttttgtagctattacaaatggatttgcttttttttattttttttttttgaaatggagtcttgttctgtcaccaaggctggagtgctgcagtggcatgatcttggctcactgcaacctctgcctctggggttcaagtgatccttttgcctcagcctcctgagtagctgggtttacaggcatgtgccatgacattcagctaatttttgtatttttagtagagatgggggtttcaccgtgttggccaggctggccttgaactcatgactttaggtaatctgtccgccttggcctcccaaagtgctgaaataacaggcatgagccaccatgacaggccttgatttctttcctggctagcttgttattagtttacagaaaagtatgttaaattttatcaaatgcttttcttctgcaactatggagatgatcatacagtttttgttctccattctattgatgtgttgtatacatttattgatttgcatatgttaaaccatgcatacatgcgtgttacaaaccccattagtcatggtgtgttctctttttgatgttttattggattctatttgccagtaatttttttttttttgaagatttgtgcatctggctcatcccggatgttagcctataattttcttttctatgtgtatccttatctgattttggtatcaaggtaatgctggatttgcagaagaaattagaaataaaaattccctcttctttaattttttggggtagttttagaggaaatcaagttagttctgtcaatattgatagaattcagcaggaaagccatgccatgctgccagggttttctttgttgaaagaatttttatcactgagtcagtctcagcactcatataataacctgttcaagttttctattcctttttggctcaatctttataagttatatgtgtccaggaagttttccatttcctctaggttttccaattgttagtgtatagttgttcataataatctctaataattctttgtattcctgtggtatcagttgtaatgtcttcactttttattttatttacttgggtcttctttcttttatccttagtctatataattgtttgccaattttgtttatctttccaaaaaacttattatgttattaatctttttgttatttttatatctatttcctttaattcacccttagctttattctttctttccttctgctaactttgagtttggtttgttcttgcttttctagttcattgtggtgcatcattaggttgtttatttgaaatctttctacttttttgatatatttataattattaattgcttcttctgaatcccataggcttttgtatgtcacctttctatttgcatttgtttttaagacattttaaaattttattcctaaattccgtatagactcgttggttgttcagagcatgttgtttaattgccatgtatttgtaccattcacaaagttcttctggttattgatttctagttttatttcattgtggtcggagaatatacttatattatttccatgatttaaaattttttgagacttgttttgtagcctaacatatggtccatcctagagaatattccatgtgatgagaaataaatgtattctgtagctgttggatgaggtgttctgtgaatgtctgttaggtccatttggtctagagtatagtttaactgatgtttctttgttgattttctatctaaatgatctgtccaatgctgaaagtggagcagtgaagttcccaactgttattatatggttttctatctttctctgtagctctaataatatttgctttatataatctgggtgctccagtattggatgcatatatatttaccattgttatatcctctagctggatggatttccttattattacataataaactttactgtgtctatttttgttttctgacttctacatatttttggtttatgtttgcatggattatctttttccatccctttacttttagtctatgtgtgtctttacagatttttcttgtaggcagcatatagttgggtctttttaaatttatctagcaaatccatgtgtttttattggagaactgatactgtttacattcaagattgttatcgatagacaagaacttattcctattattttgttaattgttttatatatcttttgttctattattcttctcttattgtttacttttgtggtttggtcgttttctttagtgataacatttgattcctttctctctcatttgtgcatctgctctgcaaatgtattttataatttgtgtgttttcaccatggcagacattgttctttcacttcaatatgaagattcccttaagaatttcttatagagctgttctagtggtgataaatttccctagtttttgctcatctgggaaagagtttttcctctttcatttctgaaggatagttttgtgagatataatattcttgactggcaattttttttgaactttgaatacatcatcctattctctcctggatgatgaggtttctgctgaaaagtatgctattagtctgataggaattcccttatgtttgacttgatgcctttctcttgctgtttttagaattctccctttcatttttacttttcaaagcttaagtatgatgtgcccccttttttttttagacagagtctcgctctgtcacccaggctggagtgctggcacactctcagctcactgcaaatactgccttctgggttcatgctattctcacgcctcagcctcccaagtagctgggattacaggcatgtgccccaatgcctagctagtgtgtgtgtgtgtgtgtgtgtgtgtgtgtgtgcacatttttagtagagacagggttttgccatgttgcccaggctggtctcgaactcctgagttcaggtgatcctgccttggcctcccaaagtgctaatattacaggtgtgagccaccacgcccagcctgatgtgcctttaaaaaggatctttttgggtggaaaatattcgatgaatttttaagctttctgtatctgaaaagtctgcttttttctccaatacttgggaagatttttagctattatttcattaaataagtttgctatgactttttcagtccaatctcttgactttctgagactcctaaaatgtgcacttaatggtgtctcacatgtcatataaggtttctgcattctttttctctctctttttattttattttattttattttgcctgactggattatttcaaaagatgtttcttcaagttccccaaatcttttttttctgcttgttctactctatggttgaacccccagttgtattttttagttttattcattaagttatttagtgccgatatttcagttggtacttttatatgattatatatatatatatatatatagttctaactcatgtgatgatcattttcctaatttctttgtattgtctacgtgtgttttcttgtattgcactgcatatccttaagatcatcactttgaattccttttcaggcattttatagctgttcccttctttggagtctcttaaaggacagttactgtgttccattggagaagtcacgtttctttgatttttcatgtttgttgtgtctctgcattgatatatgtgcatctggtgaaattgctgcttactttaatgttacggagtcaccttcataggaaaagacgttttctgtagatatatctataacattagtttggtaaggtgcctaactttgttttgggtgggcacagtactgtagtatctatattatttcttcagttgtaatcaccgtcagcagtgtcttcaagttttttagtggcttaggttgtagttgtttatggagctttggggcagttttgctggtgatggagatgcggggtgggtggatccttgagcccctgggaggcatgtgacatttctgttgcttgagagggtgggtctaatgtcagtggcagtggtttcagtcaggtggctctgattcttgggaatatgtgctttgtcctgggggcagcctccctaatgcactggaccacctgttccctggtgtgtagggccatgcatcaactcggatgccagggactcagctgtatcaataggtctagctggtataccagtgcagcagaggacctcaggaatatggagatgcaggggctattgggccaaggcagagtgtaatctctgatggctctgctctcaaaatggtgctatgctgcagcagcctgggtcttgggggtggggaagacctatattgactttccccacaaatgattgcaggcatttgtggtagaaatgtagatgctagggatctccaactcaccttttcctctcaatgagatgttgctcttggctccgagcctatcttagctggctgcttcactttcctcttcctgctgccattgtgagtttctgtatcccacagggtctgtgccacttctttgctgagttttgttgttctcctttacattctctattttacctgtggttattcgggtccttctttgtgaaggaggcaagagttgggtgcctctagtcacccatcttgatggcacagagctttctgtttatacctgtggcagaaaaatgttttattatttttgatttgggacaaggtagcaaagtgaaaaaggtcacctctcaatctatgcatgactttaagcatgtcacttagtatctctgcgcttcagcttgaagcctctgtgcttggatgtgttctgctgaaaattcttgcatctgtggaattctatgatcctagggcatgctctttaggtactttcattggttacatagtttaaaaggccagtatataacacacggattgcctagagggctgcatctgctttgtgaacatccatgccaactttttcagagaacattccaaaacagtatggcatgtggtccatgttctctgctctttgatctgcacttcattcatttcagaattcaccattttattcttatatgttagaaatagaaaatgcactcaggggatatatggaattttcctgcaggacagaatcactcaagtacagcacgttttttgttaagctagtatattttcaataattcctagaaataataaatgatttcactgcagaactgcatatttttctattactaaactgatttctgcagattgttattcaacccttagtgaaattccaactgtgtactaggtgctgtcagaacacaaagttagtcacatatcctacacagtgagcataatattcatccaaatttcacaggtacattcaaccgacacaacactgacagcctttacaaacacagtgatcatttctcatcacaaatgaagcctgtaaggtgatggtatgtagcaacatagcttattatcagtttattctctgtttattatcacaccaaatttatttataactgcttttaaagaatattataacaaagtaccaataatatatttggggatattttcaaaatttttttagaatttgaatacaatacataatatagttggacactgtaacgtaatttctgttagtgtctctttaattgcatttgcagtattcacagggaagtgttccgtttggataattactcattgggtgaagatcagcaatttggctcatgagcacttcagaaaatgactcaaaattttgtaagaagagaatttcctacaaataccccaatcaaaaaaaaaaaattcagttaagtgcttctttcatacggtttccaccagaatatgttaaagatttcctccaactatttattctcctttaggttattcataagagtaccatttttagtaaagagagagccaacttttttttaatgtgctcaatgtattatgccatacacttttagaaattataaatgttatgacttaggagaaattaaaaatatgttaaatatatccacaatgcataataaagatacactatcattaatacttatttaacagtataccggttattattatttatttgtaagttgttgacattcttcttaattgtttatatccaaaaataattttttctaaaattattacttatgccagttaacctaacataatatgcacacatattccattttgtgcacaaagctataaatgttgcaatgaaaatataacaaaatatgtaaggggggtatttacctttgctcagggaacttacaagcatgctttctccctttgtgtgtgtgtgtgtgtgtaaatcataatcaatgtctctaaactttatgactgtcagagataagcaaactaatattgtgaactttttaaattttaagctatcatcctagaatttttgttgatggtttttgtcattttggcctctaagtacattgtagtagtctgttctcatgctgctaacaaagacatacccgagactggggaatttgtaaggaaaagaggattaattgactcagttttgcatggctggcgaggtctcaggaaaattacaattatggcggaaggggaagcaaacatgtctttcctcatgtggtgacaggagagagaatgagagcagtgcgagggaggagccccttataaaaccatcagatctcgtgagaactcactcactatctctagaacagtatatgggaaactgcccccatgattcaagtatgtccacctggtcccacccttgacatatatggattattgcaattcaagatgagatttttgatagcggcacagccaaaccatatcatacatcaaaattgtaatctgtgggaaaaattttaaattttttctacattttcctttttaaaaacatctttgttttcctaagaacatttaggaagtagcttatgtttcccttatagttaaaagagatgttttaaactgattgaaaaaaaggcctttgcactcagggatgcctgggtccgacttacatctctcacacacagtggctctgtgatcttatcaaatctcctccactaaatgggagtaacaatgttactcataatattgggagaaatacattggatgatgtgtttaaaaggcttcaattagtacccaacacatgtaacctattcaaattgacaaaattaccgaatgtggatgtcagtaagttctttcgatttagatatgacaagtagattatgttatactataaaacattaatatatttaatagaggcattccttctgtaattatcttttacctatgtccttttttctcgtttgtattacagccatcatagtaagagtttagtcactttaattacaggcaattcaaatttaaattttactttcagtaggtatctattaagcacccacaatgaataaagtgattttatatgttacaaacaaaaccaaaactagggtctatttaatagaactgatagtacattgctttctgaattacctaatagcagaaaacatatctcttctcttttccctttttgcattatgcttagagttggttacaggccgggcgcggtggctcatgcctgtaatcccggcactttgggaggccgaggcgggtggatcacgaggtcagcagatcgagaccatcccggctaacacggtgaaaccccgtctctactaaaaatataaaaaattagccggtggtggcggcgggcgcctgtagtcccagatactcgggaggctgaggcaggagaatggcgtgaacccgggaggcggagcttgcagtgagccgagatcgcgccactgcactccagcctgggcgacagagagagactccgtctcagaaaaaaaaaaaaaaaaaaaaaaagttggttacagccaattatctattatttattgagcatctatttgttgaccaggcgcctttagaaaaaattaaactagttcttagggatttttagccaataaattgtcaaagcttgtgatgatttggctcagttctacacttttaaataagattttggcatttgtagctatagtcactctagtaattagagatgaaagctgaattaagaagataagaatctattaatatataataatggcatcagggttaccaataaataaaactgttcttttaaattattagcatagaatttaacttctaaaaaatgtcttaacaggcaatattctcacacttcatttaggacataaattatagaattatgttatgcagtgattgggaaattaatctaacattttttcatttttaagcattctgtagcagaaaaatcattaccctgaatacaagttatagtttttctattgaagctctatgaaattgagcaggtcatttaatctttctctgtgttaatttttttcctttgtaaatttagagtcaaacttatatgttatatctaaaatctctcatactgtacctatgactaattgacaatagggtactaatgatgatgatacagaaaacaaaattttaagtactacttttatttgattcttagtgaaagaaaacttgtgcataagataattataaaaatattatgacttttaattttaaggtaaaaaaatattaccaatctaaataatgtattcaagtaaatggggtaaagatggaaacattggattggacaatattttggcctttgtaatactggataaacctaattttaccatacttaggagttactgtgatactttttgttaaagacatcacctgtaatttgaagaagatgtacttaaaggtcaaattttctgagcattgatttttctttcttgtgtgagcaatgaattttgaagttacattttatgaccactctttaatattgccatttgctaattttaaggtgcgttaggtataattattcttttaataagggcagcagtaaaaagtgtatttgagtagcaggcttcactgaagttgccatattcctagtttatccctacaatattttccatctctgctctgcaaccagtattaacaccattttctcagtaccataagattttcaaatacaactgctctatttcaaggtaagttaaaaaacagaccctcaagtgttttaaaataatgttgctttagctctgataaatcaaataactatatgataaattgaataacacaaataactctgtgataaatcatataactctgattaatttcagaatgaccctagcccttcattacaagttctctaacataaagttaggagcactgctatgttcacacttctagggtgctggttgaaggcaattcattagtggtacaatagaaatagctatgagaacaatgaagggaatcagccctaaactagcatgaggtctagagaggggtaagttagcatggtggcaggtgtgagtccttgtcaaatataagaatacatgacttgaagtggtaagaaagggataaggccaaaatcaaagatgggaaagagagtataaaacttgacctgtaaacatgacatcctgcaaggaggtgagtaaccaagacacaaagccattaatggagtagagaaaccaagaaagacaatgaggtttggctcatgcctgtaatcccagcactttgggatgctgaggcgggagggtcacctgaggtcaggagttcaggaccaacctggccaacatgatgaaaccccgtttctactaaaaaatacaacaattagccaggtgtggtggcaggcatctgtaatccatagctactcaggaggctgagatagaagaattgcttgaacctgggaggcagaagttgcagtgagctgagatcacaccactacactctagtctgggcaacaagagtgaaactccatctcaaaaacaaaaaaagagagaagaaagaaagaaagagaaagagagagagggaaggagggagggagggaagaaggaaggaaggaaggaaggaaggaaagaaagaaagaaagaaagaaagaaagaaagaaagaaagaaagaaagaaagaaagaaagaaagagggaaagaaagaaagaaatgaggttttaggtgagtctggagaaattccacagagagagcgtaggttcccatggatgctttctttctggtttcccagtgctatggtttgaatatttgtgtcccaccaaaagttgtatgttaaaactgtatgaccaaagtgataatattcggaggtggggcctttaggacacaatgatgttatgagagcagatccctaatgaatgggatattgctcttataaagaagccccagacagtagtcctgtcccttccaccgagtgaggacacaccgagtgagtgtacaattaccaagataagcctttctggaaaatatgtttgtctttatttttagaaataaggtaagactttagtagttttaaatctacagttcattctcaggactttcctatcactgtttcaaaaccatgctattgacaagtatttgtttataagattgagaggcactattaggtaagtagaactgagcagactagtcttctcataaattgtttaggtttataactaactcagacattttatatgaataatataggtataggcccacaaacagaggtactctaacccaggcatttttccctttgcgtgctcccagatgatgtaatttgagaaaacaaactatcaaaaattaaatttccacattattattgtctttctttaggtcatgagaggtcacatcataacctgtataggatcaacttttgctcttaaaagagattgtattattcaaaatgtttctgagaaggctgggcacagtgtcttatgcctgtaatcttagcactttgggaagccgagggaggtggatcacttgaggtccagagttggagactccagcctgtccagtatggtgaaaccggtccctactaattcaaaaattagctgggtgtggtggcacgcacctgtagtcccaaatacttggaaggctgaggaggagaattgcttgaagccgggaggcggaggttgcagtgagccaaaatcatgccactgcactctggactggattacagagcaagactctgtcagaaatatatatatatattcataatatatatagatatattatgaatatatatatttcttatatataagaaatatatattttaatctatatatatttctgggaagaatatggggtgagacaggttttggttttggagaaacaaacaaattgttcattttctagagattcagggagttgttcttatactcagcctaagaaaagacagtttagagtagagttcttgaatctgccattttggactggataattaactgctgtggaggtcgcctgtgtgcatgagatgtttagccacatagcaacatccctggcctcttcccgctggatgcgaggagcaccttcctcccagtcatggcaatacaaaaagtctctaaatattgtcacatgttcaaggggtgtgaaacccaatcttgaagctctgagttagagaaactcttctttgggaggtaattggtgcctaaaaagttcatgggtccaagaaatgaatccatgaagggactctgtacagggaatcaaagaagtagccagtagtctccaagacaactggtaggtattccttactcaatattgggtttccctctaataagttattgtgtctctattactctcaatctttccgtaagctgtaataaatgtctttgcggccgggcgcgttggctcacgcctctaatcctagcactttgggaggctgagacgggcgtaacatgaggtcaggggatcgagaccatcctggctaacacggtgaaaccccgtctctactaaaaatacaaaaaaaattagccgggtgtggtggagggcgcctgaagtcccagctactcggaaggctgaggcaggagaatcacttgaaccagggaggcggaggctgcagtgagccgagatcatgccactgcactgtagcctgggtgacagagtgaaactctgtctcaaataataataataataataaataaataaataaatatgtctttgcttgagccctgaggcgttaaggcaggcagatatgttcaggcttcaagtgaggtgatacagaaggaaggtacagcctgggaaagcctattatataagatggccaaaaataactgccagagattagggcaaagatggggctggaatgagaaacaccttcctgatcttgtgtgtgaaacatgccaacattcttcaggcatcttcagagatccctattagcaaatagatggggatacttagactttatctgtgtgatgtagtacagaaagttgatgctggtgagctagaataattgagaacttttggttaccccaaattatcgagttgtgcagaattttctcctaaaaagtacagtgggacttcctggatcctagagcagaagaataagattcttaaaatataacatgttaaggtggagatgtctttcagtggaccttaaatttgataaatatgaatatgaaaatttatctacagccaggcaattgaagatgattaaaggtagatattacagaatggaaactctagattaaccaacaaaatataaaataaaatatagtaagctgtcaatgttgatagaaatgaagtgctttcacatcttccagatgacagtgtaaattatgtagtttggaaaacaatttaggcgatatgagttcagtagctacatatggtcatatgtttttgcaaaactattgattttctagtagtctaagaatgtaatctataataacctcaaagctctatggatagagatattcacactgtggtgttattcatcataataattaaaattacggataaaatcgtaacgtcttagtctaagaaaattgttaagaatattaggttcagtccatgtcaacaaattaattcattaaatttatgtttgtgaaaataaagaggcaaggcgcgatggttcatgcctgtaatcccagcactttgggaggccgaggcgggaggatcacctgaggtcaggagttagagaccagcctaacatggagaaaccccatctttactaaaaattacaaaattagttgggcgtggtggctcatgcctgtaatcctagttactcgggaagctaaggcaggagaatcgcttgaactcaggaggcggaagttgcaatgagctcagattgcgcaccgttgcactccagcctggacaacaagagcaaaactccgcctcaaaaaaaattaataaaaatataaaatttattccctttacaaaacaaaatacaaagatgccaaatagcattttctcattatgttaagaaaatgtacacttatatgaaagactagaagaaaatatgccaaaatgttcaagagatagcctctggttgatagggcatgggcattcctaatttttttttataactagcatgccagaatttgagaagattaaacattaatttataaataaacaagcacagctctttagttttatttttctattttttttttttttacatagctcagctatttcttttaaagtcaacttctttcataggtgttgagtttcttaactttagaaaggttgtgaaacccagtagcaggtgttgggtacataattatttaaatatgaggaccaatcattaagaatgttggtggggaaatgtgttgttttcttaaaaacgagttaagattatttcacgtagacataaagtataagagtttttcccataacattaaaatttaaaaagtgtatccaaacaatgtgccttggtggattattaggtagaatattaacggtttgtggttatataggaaagaatcttattgctactactagcttgcctattactaatagaacttcttatctaagttgaaaattaatgcaagcacatctccattaaggaaagaaccaaatgatcctgtgcaataagagatttttgaatgaaatgcctaattttattgccctgccaaaatgcaatgattaatattgtgtcctatcaaatctatacttgtattggatcagttgccagggatgaaggatttattgttacctggtatgtgataactcccctccacatggaaggatttgtgcagacgccaccttggtcaatgttacctatggacaaaaatgtgattcctgagtgctgtgatcaataattgggcaacctaaatatcgcatcatgatccttgtcatatcacataggttcattgctatccattgcttgattcctttttcctatcttactttgtcctgaatatattcttgaaattgtatcaatcactgttttgtcaacatgttctaggcttgttaagttttctgctctgtccatcattgtgtttcccagggatgtcttggtgaagaaaagtgtaatatccccttagagttaagaaaatattattctgggaagtggcaaattataggcagttattgcataatttctgagcgaagtgagcagttatttgcccagagggaccatgaagtagccatgaaagaaaatgaccccatgtatcttggaagaaattaaaaagtaagaatctgtgacaatgagggtgcctcagtaccataaatctgtctcctccatttcttaatttcaaatagaacagctaagaaagtaaaacatattaaaagcaaggtgttaaaatctaaaagctatcgttaaagtagctgcagttacatgcctggtaaagggtctaaaatgttgtgtcaagaagtttaaaattattttcaaagacacgatcattagaaaaaagtggcattaatggagaggggaaggcagtagcaggatcatctatttatagaagttttaggctatctgtctatataagatagcctaaataagaaaagtcaaaacaggcaattttctagacaagtaaatgaatagttataatggcttgtgctatcttaaaaatataaatgatcacacggaatgtcctatttcttaatagtatgatattaacacacatgaattccatcaacagagagattaaacaaacataacatcagaagtacacaaataaaaataatgtttaatatccacagctcatcattcatgcctaggctctatgtgtacatgatatacctgcatgatttttgcaggagcagattgcaaaagtaagaaacagaatctctctgagaagataatttccacatacaatgcgccttaccattttctgtctctctgctactcctttatgttcattttattgattcttttaaatcaaatttatctgctttcagttaaccatgcatccagtcctgttggtatttcctactactcagcttttcatagattcctgagttttgttcaactggctcttatttttataaatgaaataactatcaccccaactatgcctctgacacatttcctcggagagatgaagaagtggataaattgtcttacttgtaaattatgagctacatagaggagggaggatgcgtttctataccttttatatcctacactgcacatggcttactcatgttcatagatttggtacattcaataaaagtattcaatgtctacataatagaaagcactcctttccaacagtggaggggaatagtgagaagaggcaatttttctacatggtgtcctcatatggtcaatctattaagaagaagaactggctaaggcaaatgtcaggctgcatattactttgtcactgcaatgagaaataaatgtgcgtctgatagagccctggagaggcacttctacttttggctaagaagcagttgaggcaagtttttttgagtatatgacattctgctattgagtccttatggcaatataaatttaggctaaagatggggagaacccttgaaagcctcagaattgtcttagttcattttgtgctgctataacagaacactacagactgggtaatttataaacaatacaagtgtattcggctcacagttctggagcctgggaagcccaggctggtgaaggccttcttagctgcctcattacatagtggaatgaatcacataaacgacagagtatgttcaagagagtgagagatggaactcacaaccatacgcccttttataatcggcatgaatccattcatgagggtgtagccctctagacctaaatacctcccatgaggccgcactcccaacattgttgaactgggatttcagtttccaacacatgctttttgatagacacattgaaactgtaatcctcatgtgggcctatgattcaccgtcagacgtgtagcccccgggatggagagagtcatcctaactttttctgactatgcatgccacgacttacattgtgagaggctgtgaatatcaggtttgttagcataactctctcccaccttgtatttttcactctgtacttttttcaaattagacttctctctgctttccacacatgctgtgtggtttcacgcccccaggctttacttaagtttttctctgccctgcccacgtccctacctatctaatttctccgctttcttcaaagcttcatgaatcctttcttaatcctctattcagaaatgatcccctcctcttatgtcacaatagcagggcattttcactcttcttatggcattttttaaaaacctgatgtagatgattgaattgtgtgcttatgcctgatatcttcaacaagtggctattaacgaattgaggggcaggatccatagctgtatcacctttctttgtatattcctgagtaccaagggtttgtccatttatcttttccatacacagagatgctctctctctctctcttatcttccctctgtctctctctctctctctctctgtctctctctcacacacacagaagtttggacacagtatagtcttatgatacaaacttctaatcagaaatttcatttgtgtctgatagactattgctaccatctccctaacctcactctaagaacatttaatgtctaaattaccttacaggataccagtcaaattttcctctggcatggtttaacccattgcctaagaaaaaagtaatttgacttttttttttttttttttgagacagagtcttgctctgtcactcaagctgaagtgcagtggcacaatttcagctcactgcagcctccacctcctgggttcaagcgattcttctgcctcagtctcctgagtagctgggactagaggtgtgccaccacccctggctaatttttgtattattagtagagacggggtttcaccatattggccaggctggtcttgaactcctgaccttgtgatccgcccacctcagcctcccaaagtgctgggattacaggtatgagccacgcccagcctgaaagtaatttgacttctaataacacagaggagaattcagttgtcaatatttccacctgattaacagatgtgcatgtatgtgtgtgtgataggcacttggccactcccagtgtcaggttgaaaaattgcaggctgtgtgaagatgctatttgacacacagagtatacttttaactgtcttctgtgattttgtgtgtgtgtgtgtgtgtgtgtgtgtgtgtgtgtgtgtgtgctgaagtcattctttggtatccacaggggggactagtttcaatactctcacagatccttggatgctcaagtcccttatataaaatagcataaatttgcatataacctcctgcatattacatcatctctggattaggtgtaatacattatataatgcaaatgctttgtaaatagtcactttgctgtatttttttatttacgttattttgattgtatcattgtttcattttttttaaagttatttttcatccatggttggtagaatctgaggatgtagaactgtggacgcagaaggcctactgtgtagcatttatcaatgcccaagagaaatgaagaattggagtaaataaatgagtcacggtctttcacatctataaatgtgctacttccaccctttcctgcaaagagctgaccatgagtttacttaagtgtggttagtgcattccagaaccagtaaagggtgtgagaagggtaccgtggcaaaataactttctaaatatattgtctgctataagatcaagaggaaataagaggttctctagctgtgaggtgctgagagggccattgcttaaggcagttcagcgatggtgagttgagggccgcctttcccctcctctcttcctgataaccccatcccaggatgccaagtggacgaatcatctgtataaagcgctctgcctggggaggacaaatcgcagacggtatctcccctatgcatgttagcctgtgtctactcttgccccctgccctccctgaaggcaatgcactgcccttttcagcgtgaaatccccaggctggggctggattctgagctctacatttctacctcccccctctccaacccccgctatttctatgtcctcactgataaggaaggagctagggtccttgtggaggccggggcgaggcagttgagttttctaaggagccagagagaaagtgcagatgaaaggacccatcgtcagcgtttgcaggtcgcggtaaccccaggccagattgacatgggctccgcacccgggccggtgattctgcctcttaaccgctcttgcaggagaggtgacgttaatctcacaaacgttttcctacccttctaggagaaataacgataagccccaatcttaaggagcagagagttagttccgggcgtttgccacggctccctcacttcaatttacactcgcacacgcgggtacgtgggtgttcggggtagggcactgatctggggaaggtctcccccccgcgacccaactcatctttgcacatttgcagtcctccctcggtgcactcctggcggggatctggccagtgcagcgcactgggaccgagggcagagcccgcggagtgaggccaggagagacttcaggcctctaaggacacagctgaggctaaggctgagttgaacgcagcccctcccgcggctcgtcccctctccagtgtctctcccgtaaggtgccgctcccaacagcaatgggtcgagatgtagaggaaacactctgtacgttatttttccgcccaccctttagcgcctgaggagacagacagtgtagactttagggtacaattgcttcccctctgtcgcggcggggtggggagcgtgggaaggggacagccgcgcaaggggccagcctgctccaggtttgagcgagagagggagaaggaggtccacggagagacaagaatctccctcctcccacgcccaaaaggaataagctgcggggcacaccgcccgcctccagatcccccattcacgttgagccggggcgcgctcggggcggtcgcctgcagtatcagtatcagcatcagcatcagcatcagcatctgcatgagcatcagctcagctcagctcagctcagcatcagctcagctgtcctgaggcagccggcggctgtgaaggagctccaggctgcccccatccccacgcccttctcggctcagggcgtgcatgaacctgcggatggccggcgggcgagtggcgccttcgcgatcgcggccgcccctctaggcggaggcaccggggaccgaacccgtgacttcgagctccactgcggacgaatcccgggaccgcgcgcctcgcggaagagcggccgccgtgcagcgcggagggatacgcctcggccgcacctcccctcgccgcgcccccgcccccgccgccctccccgcccggctctgctgccgccgcggcggccgctgctgctgctgcttctgccgccgctgccgccgccgctgcctggatatagtgcggcaagagcggagcttgcagtcactttgcgaggaggagcgcgcgggctgcgggcggctggggcaccgcgggagcggcggcggcggctctagcagaggcggccggggcagcgaaaggttctctctccagggctggacttaataactttgaaactgtccaccggtgtcacgtcctgaacatgagcctcctcctctccttctacctgctggggttgcttgtcagtagcgggcaaggtaggagtgtggcgctttattgcatttactttccctcccccttccacccggccaagagaggcaaagagggaggcgcaggaagaatgaaatgaaagaactaaagttacagttattgctgttgttgttattattattttcgttctttctcctagctgtccctaaaattgtatctgttgtgtggagacccttaaataagagaagggaaaatacagaattggagaggggaatcggtgagcaggatatccagggaaaccgcttcttcttcttctttttttttcctctgggattatggctttctcttatttttattatcagaaattggatgagtgtgttaacagtgaaatatctgaggttgcggaaggaaagggcacgatggtgttttacagaagcagcaaaaactatcagtgttaaactcatttgcaaaatatctgctgtgtgcaagacgttcgattcttggagactcttttttttttccacccctttcccaaaaccctaattcctgactatgaagtgaatgatgatggcttatttctgttggaaactaagagaggggccgtggatattgtgtgtaagaaagcaaatggataaaactagggatgtgttgcagtcattcattttgaccccaaccccttattaatacagaaaggtggaatcattttataacattacattgtaattacacctgtagaggatttttggggttgtgggagaactggtggaagcttttatctcttaaaaaaaaaaaatgaatagcctggtagaataacctgagagggaatttgtggaagctatcactgtttgtctctagagagatagatatgaatttatctggctgtttagatagtaaacactcacatgaaatatatttacaataaatggaagcattttcaactgtccagacaagtttggacgtttaattagggacacaaaatgctaaaacatgcattggtgaaagtctttaaaggaaaaataaaatagcactaattttgagatatgtaatgattgcaaagaatgttatgttgttagtgtagtgtgaaattggttttttaaaataatataataaattacaagacaagttaaaatatccccaagatattcagttctaagcatttttagcctcttctgtattgctcgtttggtccagcagggggtggtagaactccattttaagcccagaagttggtttctgctcttccacagagtccttctatcattcttcagcagggcttgacattttggatgtgaagccttcctttttctgcccttctcctccccacagctatagtgttagtggcggatgaaacacgattggatgcagatttaatgttcagaaatcagtatgcaaatgttggatattcctatagtttgtaaagtgtcttgataagattctgctcattttcccttcctaacatagagtatgaaatatttcagtcttagcaaaattgcagatatgtccatctgaagctaatactagcccaattcgttaattcagtggttcttaagcaaagatcagcatgcacatatgtcctacagatatgcttctttaattttcagatagctgctgattgtgtttaactgttcatttatagcatagacaggtatttttgagcaccaagaaacaatccctgaaaattgcagttaaaatacaactgcaattaaataagtgtaggtagtgtggggcagaatgggagcataataggaaacaagtttatgcagacttaggattacattgtgagtggtttggagaagaaaaatgtctcagttgtggaatctgaatttatcattgtagaggctaagtgtgttggaatttggagacataggaaattagaaatgtttagatatataggtttaaatagtacacagagacataaaatttggatgtgtacatgtaacatagatgtgaaattgtgattcagctaatttgtaagtcaggatacgaggtggttatgaagaggcactctgagacaagcatctctgaaggggagcccatattcactgtaatgaaacagggtagaaggagaccatcattgtaaagatctctctatctagtacaatttcacaatgtgtggcactcatagagacacagatatatatcagagagacgtagcttttgtgaaagggaacatatagtacttctatgccatgtgtcctgatgaagtcagagatgcttggatatagatatcctcatcctggagtccaattcctctatgctagtgttttgttctctaattaaggatgcagcagcaagtatcagacacaccaccgggagctgtttaaaaaaacagacctagtgtaactcatgattttgtttattctcttgtaaagagggccatggaaaagccaccagtcagtgatccctggtcttgccttagaaatactaaaatctcagcttgctgatttatgtgtccaacagtatacttgcaggggattttatgaagcatgattgaagctattgctttggaaagtggtgtgcagttagactgaggaaaggcaacaatgatgtattccctttttaggagtcaaaacgttttgaactgaagcagttgaataggagaaaatgacattaagtgagaaactgactaacttaagtgaatgccaatactataattagctaacaaggcctaatagtttacttgtaactctcaatacaaccttattgttgtacagtagtaagacgcttttttttattgtagcagaaatactcctttaaaagcctctaatttccactgcaagattaatgtataatgaagtaaggttagaatgttattgtgaagtctgaatttaattgtcaatgaaagaaaatgctgtaattctgtaacttttgcaattatttttcctttgtgttcaaaacttggtcacaggctttgtaatcataaatctcaagtgataacttcagtttctgattaactgcatttgctgtttggatctttgtatattcaaatttccaaactgttgtatgtatggattgctttcgtgagagtttttacatttttgaaaccacttccttcttcctttaaaaattaaacaagtatgattaataagcatttttcctggatgttcacatatgtaagatagaagcactgttatactaaaacctaaagtaagaataatgctattcatctctcttgcaatgcagttcaaacgtaccacttagaacacttacctaagccaaaatcgtgaggaaaggaggggtgaattgcccagttgatcagttaaagcagtcatctgcttacagttattctctttggtgaagtgctagtaagtcattgtacattacagcaatgtaccttctaaaaatagagcacaggtgtgtgagtgtctactagtttgaagattacaggagagagctccacaaactcatcttctgtcggggctgttacatggctccagcctctctcgtatgctttttctatctgctgtgctctaattctttgatatcagcctctctgtgcaaagtttctattaaatcgactgggtcttcttttgcacttggggaagatgtaatgtaaaggctaatgtaaattaatatctttattgtcagagtaacccagaggatttccctcactacttcatatcaaaggagttaggcagagtattttctcacttttaatgcagaatcggagcccatagagcaagaagggaagttggtgggtcccgagagtgtcagatgagtcttttcaatgacacagggagctaattttctccccgaggtactgtcctactagagaagcaattaatggaacaaaagaacctcattcagtaccaaaagttagacttcatatgattttgtaaatagaatggccttctttcaaaaataggactagtttgcaatgaaactgagaaatgagctacagagattgaggctagtaaccaagctgaacagtgtaatttgtttttgcctgtcctcgtgtggaagcagtgcaaatagtaacaggatcgacaatctgaagactctggaactggtcctcctgcattctctgtcttttaacatttgggaaatcattgtaacttatctcttttcagggtcatctctcacagcaatgaatttttgagagcatgaagaaaagtgctcaataactatagagtgattctaaattgccctatttccccccaaaatgaaattaatcccttgagtgttgatatgtgcaaaattaatttaataatttgaatatacttctgaagggactatcattgtttttcaaattttgttgtcctaaattttaaatttattgttccctttatacaatcccaattaaactgaggataggcctatttaaaagattataaatttgttttaattttccaaattacatgatatgagaacactttaagatgcaaccagtgcttttatgcttttattaaatgtaaaattcctgcactttatagagccaagctatctctaattgttcaacaaataaaagtgcttctctctggtgctcttttaaatattttaataacttttaacaatttacagttataataagagtactaatcacaaatagatatcaacatatttcctagttttctatgttcacttgtgccactaaggatccatcaaacattaccagacattttagaaagctgtgaagtaatgaaacatcttgaatttaaatcaagatgtttgaatttaaatcattaagaaagataatggggaattttgagaatatttataagcatggcaatcaaaacattatagtttgaagaatttcaggtccattgatcaaatctttcttggctccatttgatttattacaactcacagggatgaagaaaattcattggatttggagtcagaagacctaggctactaagagtctcttaaccttgaagaagcaacttatgctcttagaaccactatttgcttatttgaaaatttgatattataaaatctggccagttgaccttgatgctcggccatgaggagcaattgtaacaataaatatgtgtaggcaggcaccttaccaaatgtcaaccctactatgctaggctttgtttatattttttaataatgtgtatacagattaatttgtggcttataaacatttatttagttttaaaaaatcatcataagctgctctgtgattagaaaaaaatatcaaggggacagagattacttaagttattgataagggcgactcattcatcatttattcatttatctaacatttacagaatacctgccctgtcccagacacctcattagacagcattactaggaatggttgcgtagattgtgtgaagaacaactccagggggcgtcacttattgtcctagtgatgcaacacatatttatttttacaatttgccagcagatggcagtaaaaggttttgaggaatgatgcgcttttttttgtatcatgaatcctttctatggaccaacatcaggctggtgttaaacaccaagaggcttaggatgggcacataatgaagataaatgacttactaaagatcaaacagaaaagtaaaaaggttagttactagagctccagtctccaaactcttcagttctcctaacaccaaacttgttcatagattttatttaaatgaatctaatatatcttcagctcaaagtaaaatatatttaaattctgtgccattttgtcagataatcaaataacaagcactttttgaggccttaaaatgagaatattatcagcaccttctaacagtaccgaccacttgtgcgaagtgctttcagtcaccttataacttatgattaccaatgagtcaagagacaattagctttgttttatggatgaagaaattgaggtacagaagaatgatccgatttgcctatatcacttatttttgtagttatctggaactgggagtagattttccaacttccagttgcatacctatttttgatatattgttgattcatttgtttaaaaatttgcatgtgtgtggaaaattcaatgttgataattacaaaaacaaataatataaatttaaaaagccaaataagcatgagggagatatataacttgttcaacaaaatattataaaatgacaaaatatgtcatataattaattaaacactaagtagtctgagtccttagcggtttagtgcctagaatgagctaaaattgattgtgtttactaactgacaggctctcttatcataatcctctattagcttgttattattacgattatcgttcctttatccatgagggccatgagatacagggagtttaaataactaagattgtactgcttggaaatgagggtttgcatatgggacatgtccaaagcctagcctcttaccaggacatcaccttgccattcagtgaaacagaaagggcttcaatatagtgagagtaaatggagaagattattaatacaaggagaaaaaaaatgagtgaacaaattgtaagaagggaggggcgcgttgagagaatagaaataatccagtttaatgaatccaaggattcactaagcagtttggaaaggtgagcctctgcactcagttctggaaatagtggtggaagtggaagatagagtgacctggaggccaagctggtttgactctagtgtaaatcttttggagccattgtttgggcaggagagtaacatggttaaattttggtttgtttttaagtctgctggccatggccatgtgtaggatggaccagaaggaaagcaaaagaagtggacgtggcacatgtgtctatggaagacttaataggatcttagtaacaaatacaaattgagaaattggtaggaacgtgccgcatgaagttttacgtttatttaacagaaaaaaaaggttatatcttaatagaaataggaaaaataaatgaaaaagtgcacccattttcagtaatttttaacttgttatttttaaaattatatatcaagttgctgtattcatggcacatctagataaaaatgtcaataaatttgaaaatggaaactgttgatctttttattggccaattcttcagaataatttcttcacttttatttgtcatctgtctttatcttgttcttccatccccatttatactttaaatgttgtgtagtatacttctggaattttgggtaaaatctcagaagtatgtaggtaaaatttgttttcattatatattcttcatttaagtcagcttctctgctttatttatagtttctttttctttttaacactggcacaccaaaacaaaataaaatccaggagaacgccccccccaaaaaaaaaaccctaaaaactgacatgaaaaaagatttttggtattgaatatataaaattttaacatttttctattagtgtccaagggaggaaaaaaagaactaatatttttgagcacctcttctatgccagagagctgtgttgagcatttttactcattatctcattgaatcctgattatatcgtattttatagatgacattcctgagattaagagtgcctgatttgcccagagattttaagttccttctttaggctgacgctcacatttatatcaaagagcattaaatacatttaagatatgattcggtcttttttgctacagtgtttgtttcttggatgcatcttatcttgttacaccattgataaaccaggggatgatgtgttataatgcagaaattgtgttgatccatgggttgggagtggtggctcacatctgtaatcccaggactttgggaggccaaggccggcaggttgcttgagatcagaagtttgaaaccagcctgggcaacatggcaaatctccgtctttaccaaaaatacaaaaattagctgggcgtggtggtgcatacctcactagtcccagctacttggaaggctgaggttagaaaatcacttgagtctgggaggcagaggctgcaccaagcagagatagcatcactgcactccagcctgggtgacagagtgagaccccatctcaaaaaagaaaatgaaaaacatgtgtcgatccatacatgattttctccactcattaatttcttaagtaagagccaggcttcctcacaattacagagaaagccttagcaagctatgaagacattaagaaaaatatgaaaaaatcaacttaaggcccttcctttagtacaagtattcatgtacttagtggctttaagaacatcttgatttctgctgtaataggcatctcgtgaagttgaaagtgcagctgaagaagctgggaagtcattctgcctgctgaaaaatgatgtttgttttttgtttactttgttgtttttattttttaaaggctacactgtggatcatagtttgcattttaaagtgaatgcccttcaggtcttgcatcctgatagagggtgcaaaagctaggtgcaaataccagcagagatttaactatgctagtattgtaattaagacttttatggtttttgctggtgcttgtttacagatttctgcaggttttgaatgttctgcctcctaatcctgtcttttcccataaagtatgatattttttactgcacaagttttcagaccccagagattttcagggatgcaaatatggtgtgatatcagaaatgcatgtctttacttgtaaaatcagccaatgtactgactaaaacctatagtataatatgaataggtcccaatgtaagaaaataagctcacttgtagtttgttctcaatattaatgagaggacttggggacattttttctattattgtaacttgttcattcccagcgcttttttttggtacctctgttaccagaaaggggtcccagtccagaacctgagagaggattcttggatcttgcacaagaaagaattcagggcaagtccatagagtaaagtgaaagcaactttattaggaaagtaaaggaataaaagaatggctacttcataggcagagcaaccctgaggtctgctggttgcccattttttgttcttcattatatgctaaacgagtggtggatcattcatgaattttctgggaaaggggtgggcaattcctgaaactgaaggtgcctctcctttttagatgatataaggtaacttccacaagtttccatgacatctgtaaactattatggtgctggtgggagtgtcttttagcatgtgaatgcgttgtaactaaggtactatgagctgtgaggatgaccagaggtcactcttgtggccatcttggttttggtaggttttggccgggttctctactgcagcctgttttatcagcaaggtctttatgacctgtatctcgtgccaacctcctatctcatcctgtgacttagaatgcctaatcatctgggaatgcagtcccgtaggtcttggccttattttacccagatgctattcaagatggagttgctgtgattcagacgcctctgacgtttctaatactaggctttctgattatttttatatccattctctcacttaatttttctctgattatcattctctactaatcactgcctgaagagagcagttgagtttctatgttctagcagtaactttgtaagtatcatgcatgagagaaatgccaagaacagattatgtgaagattaatatatacagtgaggtatgtcccatatactttgatcaatgacatttacgtgcttttgattaaaaaaattacttacttagataaatcacttataactttctgatacaagctgaaattaagcacatttttaatcttgttcgctctttatcatactatttagcatagaaaaactggcttcatgctacttattctatagattacacactaatctttacaccaggtaaaacttgtgaatcatcaaagggtaagaattatactatggtaatatttttgaatgtatatacgatatgttgtgggacatattaattgacaaaacacttatagtccattttaatttatctaatgaagccccacagttatcctgaaaggtagatagtatttctgatttagaataggataataaacttcaaaaaggtgaaattacttgcccaaatagaatgctttaaaaaatggtagggccagacttgatataaatattttactttagatacagcatatattcctgttatgtttctggttttacttaaaggtttgttttactcacatccatgaagcagttaccaaaaattacttcttggtatgaaacatatttaatatcattatgttcttcagagtttacttttggactgggtttataagatgccattaattttaattggagatctaccttttgtttgaaatatttgggagtgtttgacttagaactgttaatacttttgccttgtattcattgaacaatcctattctctcagcctcattgctcattactgtgcacaccagttcattcaacaaatattcgttaatttgtatcagtcattgttaaaggctttgaggagccaatcaaagatgagataatatacctgaattctgcacttcaaacttacggtactttactgtgaccttccatgtgaactccatgggagcaagaatgcctttccctgctagtgtcccattaaatgcaatgtacttgaatagagagaatagagagttttctgtaaattcatatgtgtattcctagaacatggtagaagcccggcaaatatgtgctgaatgcatatttaaatattacccggcagaagccaaattgactgattttaaaaagcatatttacttttgcctttgtataatgatttgttttgttgaaaatacatgatatgttggcctgtgtgtttatttcacacgttttgtttacatcactgacatgcatataggagatcttccataaatatatgaacgtctataaaataataaagtcatagttattatctaattcaggaggaataacaaggatgaatcaccttatccctggtcttatgtcctcactgaaaattaattaggcttggaatagagaaaactgaaatcgttctgtaagatttgttcttttgaagccttatctgaggcataggagatggttatacagttggggtctcaaaactgttcaatatatatattgaaatatataaataaatgagggggatataatatcttgataaaggtataattaactagattagatatggtcaatagtaaatgtctgctgtgtcgataaagcaagtatttaatgtcctcaaaatcaagataatcccccatagttaattaaaagttgattattcattctattgttattggaaaccaattctgaactgtatgtatggtaagagaagtgagaaaatacttgttttatcttagtttttaagagatactttaatgttttctctgttttaaaaagatgaaatttcatttaacctcaaaaatcctcctttggcctctgatagctgtgtgtgtgtgtgtgtgtgtgtgtgtgtgtgtgttttaatgatttttgtggtgttctctaggtccaacttcagtgataaaagcatttaagtttattggacggagtacatttttggataccccagaaaatctttatcacctatttatctgtgtgcctgccatttatctattaatgttaccattattatatatgatgcttttaactggaaacacagtttgcaattaaagaaattactagtgcttctgatttatctatttttacttttatctccctcctaaagtttacatataatcactttaattggtaatctagatgagttattttatttcaaagccccctcatacacgctatgttaatgcattttacctctgtgtggattgcaggtggtttgcaatttaagaacaaaacttaacctaggttgttcaatggcttatgaaggcctatgtgctttataaaaaccttcaccaccacatccaaaatggatatgaaatgttcaactttactgtgctcgtgttattaaaataacacttcttagtacacaattaagagctattatgcaataccctaagttgttaatgtatttttgctttcaagtccctgtatcatttttattttaatgaaacattttatgaaaaatagcctccttcctacactgtgcattaatacagcgattgtttgatgaacagtgacttctttaatcaggaaatacctctttcttactaggaaaatcaaaggattaaactattgactatgggaggaaagaggactttgtgattagtcaagtttcacttgagctttcctgctcagctgcctctcactcccatgccttttacctcattttaaagtctctaagtctcaggtgatggacatggatgtggatgtgtgatggaagaagataaatctttataagtgtaaagtgtcattactaattagaactccgaaacacattctaacctcccagtagaaacgcatgcagggagctgaggttgaatgataaagggaagtgaatactcaaagactaatcactgttttgtttcagggaggataattcatcacctaaaggggaatgggaatgtgggtggttgtgttagaagggcgaagagcttggataaaatctaatatagtttcatgcatacaggggagaaaaagatacccagaatgtatagaatgattataggcagccttgtttccttaatgatcagtgtgtagttttaagtatttggtgaattaattgaatgaaagaaggaaacctgccatttactctgcagggtttttttttctttttttccatagggattacatcatttttaaattcaaagcatgtaggacatctgaactattattttagagatgagggaactgattttcataaaagatatgtagcatctaataagggaaggatctgatattcaaattcaggaatatctgattctaaaatgatgctcatttcactgatggaaacatagtcccttgaagaaacgaggagttgcagaaggaaaaagacaagcactaggagtagctctagcttcaggtttttatcatttttttctggccaattctccccccgcctcccacccagctgtataatacatatatttacagtatatggcatgattttttgacgtacgtatgtattgtgaaattattatatcaagctaagtatctatcgccttatatagttatttctgttgttgttagaacatctaagatctagtctcttagcaatgtccaggtatacaatacatttttaactatagtcaccgtgccatgcagtacatcttcagaacttattcaacagaatgaaaagactaactatggaatgggagaatatatttgtaaactatacctctgataaggggttaacatccaaaatatataagtagttcagataactcaatatcaagaaaacaaataacccaatttaaaaaaagggggccaaacaactgagtagatatcttctagaagctgacatatatatggtcaaaggcatacaaaaaaatgctcaacattggttttcaaggaaatgcaaattaaaaaccataaggagatatcacctcacacctggtagattgtctgttataaaaaagacaaaatctaatgttggtgaggagaacagagaagcttcgtgcattgttttggggaatagaaattagtacagacattatggcaaatagtatggaggttccataaaaatgaaaaaatggaaatgccatatcattggttcattgcttttgaatggccaaatccaggttagtgactgccagttggtaaacgagtaactcttttagagacttaaaatattaataagcatggagaactagcaggatttagagataatagggtggggtttagagtggttgtaaggtggggaaactcgattgtttagattagtgtaattcattaagaactacataacattaatatttaaatatgagctgtatctttaaatggcttttcttattgtgaatcactacaatgatcaataatttagtaagccgtcagtctgtggatgacttactgaatattatcatagtgaaattacatcagtttaggatgcttttaggggcaaagaagagaaggacaaattcaaaatggcttaaaaataatctattatagcacaggaaaggccatatagaggtaggttttaatttcatatttctactcctggttttgctgtttttacttggctttgtggaagaaacttgtcttcagcaactcaaagcatcacatacttatgcacttacctgaagttgggaaataaagaaatataggcgcagtttattttattgtgtttccttttattgcatttcacagatactgcattttttttacaactcgaatgtctgtggcccccctgtgtcaagcaaatctatcggcctcatttttctgatagcatatgctctccttgggtctctgtgtcacatttaggtaactggcaatatttcaaacattttattattattatgtctttatggtgatctgttatcattgatcgttgatgttacaattgtaattatcttagggtacctcaaagcatacccacataatgacaaacttaatcaatttataagtgtcgtgtatactctgactgctccactgactggctgtttcctggtatttgtccctctcttcagaccttccattccctgagacacaacaatattgaaattaggccaataaattaaccctacaatggcccctaaatattcaagtcaaaagacgggtcacaggtctctcccttaaaatcaaaagttagaaataattaagtttagtgaggaaggcatattgaaagccaaaataggccaaaagctaggcctcctgtgccggttaaccaaattatgaatgcagaaaacacaattactgaaggaaattaaaaaagccactccagtgaatacacaaataagaaagcaaagcaaccttattgcttatatggagaaagttttactggtttggatagaagagcaaactagccacaatattctcttaaaccaaagcgtaatccagagaaaggtcctaatactccagttctgtggaggctgaattggagaggtgaggcgagacaggtgaggaagctacagaagaaaagttggaagcaagcataaattagttcacgagggccggacgtggtggctcacacctgtaatttcagcacttttggaggctgaagtgggcagatcatttgaggtcaggagttcgagaccagcctgaccaacatggtgaaaccccgcctctactaaaaatacaaaattagtggagcatggtggtgcatgcctgtaatcccagctacttgggaggctgaggcaggagaattgcttgaaacctggaggcggaggttgcagtgagctgggattgtgccattgcactctagtctgggcaaaaagagtgaaactgcatctcaaaaaaaaaaaaagaaaataaaaaagaaattggttcatgaggtttaaagaaagaagccatctccataacataaaagtgcaaggtgaagcagcagatgctgatggagaagctacagcaagttattcagaaattctagttaacatagttgatgaaggcaggactacactaaacaacagaattttaatatagaagaaacagccttctattgtcagatgatactatctagaagtttcttagctagagaagagaagtcaatgcttggcttcaaagttgcaaaggacaggctggctttcttcttagggaataatacagctggtgactaagctgaaggcaatgcccatttgctattcttatagtcctagcgtccttaagaattacgctaagtcgtaatcccagcactttgggaggccgaggaaggcagatcatgaggtcaagagatcgagaccatcctggccaacatgatgaaaccccatctctactaaaaatacaaaaattagctggacgtggtggtgcacacctgtagttccagctactctggaggctgaggcagaagaatagcttgaacctgggaggcggaggttgcagtaggccgagatcgtgctattgcactccagcctgggcaatggagtgagactccatctcaaaaaaaaaaaaaaaaaattatgccaaatctattctgactgtgctctacaaatgaaacaaaaagctgggatgacagcacatctgtttacaacatgatttactgaatattgtaagctcactgtagggacctacttctcagaaaagaaaaaagttcccttcaaaatattactgctaattgacaatgcctctgctcaatcaagagctgtcgtggagatttacaaaaagatcaacattgtttttatgcctactaacacaacattcattctgtagctcagggatcaaggagtaattttgactcttgctcttattctttaagaaatatatttcataaggctatagctgccatcggtaatgattcctctaatggatctgggcaaagtcaattgaaaaccttctggaaattcaccattctagatgccattaagaacatttgtggttcatgggaggaggtcacatgtcaacattaataggagtttggaagttattcctcgtatttctccatcctcatggatggccgaggttcaagacttcggcagaagtagtaactgcagatctgatggaaagaggaagagaaatagattagaagtggagcttgcagatgggactgaaattctgcaatctcatgacaaaacttgaatggatgagaagttattagcttcttatgggtaagcaaggaaagtgatttcttgagatggaatctaattctggtgaagatgttctgaaccttattgaaatataaacattatttagaatattacatacacttagttaataaaacagtcagagggtttgagaagactgacttcaattttgaaaagcattctattgtaggtcaaacacgatcaaacaatattgcatgctacagagaagtacgttaggaaaggaagagccgattgaaaacaccggacatcattgttgtgttattttgagaaattgccacagtcacttcaaccttgagcaaacccctaccctgatcaggaagtaaccatttacatggaggcaagaccctctaccagctaaaggattaggacccactgaaggcttagatgatccttcactcttttttagcaataaaacatttttaaattaatgtatggacatttttagacatcattctgttgcacacttaatagactagtataaatacaacttttacatgccctggaaaaccaaaaaaaattgtgttacttagtttattgtgatatatgctttattgtattctggactcaaactggcgatatctccaaggtatgcctgtatttctgttttgtttgtttgtttgtttttggttttttttgagacaaagtctcgctcttgtcccccaggctggagcgcaatggcacgatctcggctcactgcaacctccgcctctcgcgttcaagcaattctcctgccgtagcctcctgagtagctgggattacaggcgcctgccaccatgcctggctaattttttttttgtatttttagtagagacagggtttcaccatgttggccagctggtcttgaactcctgacctcaggtaatccgcccacttcggcctcccaaaatgctggcattacagacgtgagccacaatgcccagtcgcctgtatttctttagttgattttctttggaggaaaaatccccttaccctgtgttgtctagccaacttccctcaatactcattggctataatcatttcatatgatcactcctaaattaattggtggtgaggagaatgacattaacatgatttcctttcccgaatcaactcccttttgctgatgggaagatctgcctccctcgaagtacatgactggccaatcaaatgacgtgtccatcttgcaaggaagaatgaaggatcgagaatattgtagtcaaatatgtctgccgcaggaatgttgaaaagaccatttttgacaaagaatgcaaacaatatcaaagccaacgtttataaagttcttacagtgtaccatatttatgcgcttcgtatgtgtgatctcatatgattctccaaacttttgagattaattatcttttataaatgaggtaatgagattttaaagagtttagatgacttgcctaactgacaacactgtcagtggcaaagttgggatttgaactcagtctgatgggcaaaaagagttgtcttctaccagccaagttgccataaaagaaaactatgcattgtgcatagttttactcttgttaagtgtaagaatgataaggtaaggctattaacttgctttgtgaacaggctatgttctgggcactttccaaaaaaaaagctgttatgcttgagcttctttaatacctatatctgcttatatattattattatttaaaaaggttttacaaataaggaaattatgggacagagtgataagtaatttgccgcaggtcacgtagctatgaagtgaccaaggtggagtttgaactcaggcttgctttgcctttgaagacctgggtgcctcccactacacagtgcttggggactatagtcaatatatggcaggagaagggtaatagatttggaataaaccaaaatgcatacccttgtctagtcctccaaaagcttatgatataaaagaagctaacatttttcaaggtaaatatttttattgtttttacattcttttcaagagtatgtaggagaataacattttcaagtgtaaggaggcttaggaaaatattcatattgtttctggaagaggaagaattggttaaacaatagaaatggggctgggtgccatggctcacgcctataatcccagcactttgggaagccgaggtgggcatatcactaggttagagagatctagaccatcctggccaacatggtgaaaacccgtctctactaaaaatacaaaaaattagctgggcgtggtggtacatgcctgttgtcccagctacttgggaggctgaggcaggagaatcacttgaacccaggaggtggaggttgcattgaacagatatcacgccactgcactccagcctggcaacagagtgagactctgtctcaaaaaaaaaaaaaaaaaaaaaaaagaaatagaaacgggaaccagagtcttctatagagggagaagttgtaactaagagtggtgatttgaaatggaccgatgaggcaagttatatatcgaagcacgggcgattatgcagactcactaatccgggtgcatgcctcgaccaaagtgagctatactattcctcgcttatgatttcttccaaaagctgcacagtgaatcaaaagttagggtaatacaaaatcatggtttgaagcacttggtgtatgaaactatgcacgcgctccataatttctttttaggatagctatgctttttctttgccaggcacttgcattaacactgtgcaaaatagccaaatctataaaattttatgtaaaatatatttttaaaatttatgtaacatatatatttgtttgtataggtctgtgtatatatatttgtgtgtgtgtatatacttatacacatacagatattacatatatatgcatacagaagcttggggaaaccattctatgctgtatcaaattctttcaatgctctatcaaaatgtttgctttatttgtttcattagtttcattagtactgaaattcatgaatattttacgttattagttctttgctgatttttgcttctaagaagcaaatgtacttcattctaaaacattggactcattattcacacttcgtataactgaagactaattagccagtgtttaatttctcaagactacaaaacaatatctgctgtctccttgttacacaaaacgaagagctaaacacctctccccactattttttcaaagaaactcccaacacacaagtatccataattgatgatgttttccatcaaaacatagtcagtgaatatagataaaatcggcatttggagtatgaatgttttggttccagctcagggactgtaattgaactgcatgcgcagacttgaattcttcatttcagtttctccagtttgtaattaaagagatgaaggctgctaagtttctgatggtgttatactctgttttacattggactgcacaactgaattatcacacttcttgttacagtgctgctgaacaaatttaacatatttgtaatatcacaataagtattggatcataaaattatagatgcatattctcttatatttcagtggtctatcatcgtgtcccttttgagaattactaaatagattatctgcttctatttctgttgacagagaacagatttcatttgtgtaaagagcttttgtgaggtatgttggttctgtttttcatataaagcatttccatattttcaggtactcaggtcaactaagtgcacttatttgcagcaaaataagaatgttcaaattagagagtttgtagtaactttattgctagcaggtttatggttttatggaaataaaaatatttagagagctttcctttttctataactagcattgaatggttctattttaaaacaattctttgatttacttttacttcttacagattggtgacaccagtcaaaattgtttctgaggttttcagaattcacatcacgtggttggtcattgaagtattctggctgaatggttggatgctaaatggattcctgccagcacatggcagttccaggcattgaggccaatgactgcttagtgctggggtgaaacactttcccatgcacaagttgctggtggtttcctgtgaataaatttggatcctgtggcctaaataatttcttcagcagataattcagtgtctgtgttttgttcccagttctgttccatgctcagtgaagcctcgctctgtatacttaaatatctaagtatttttccctttagcttcaaagcaaactttttgataattatacctgcaaaaattttatttttatttgtagagatgcacacttcaaaatttatttttatttgtagacatgcaaacttcaaaatattcttccatgccataggttttatgatgattaaacagcacggagtttgagatctggcagatttgcatataaatcttgctcatccacttgctggatgtgaggtcttctgcaagtcattcaatgcttttcttaagaaaagaatattaagagtgttccttaatattttcatccatagaatgaggataataatattagtgctattcacaaagtatccaattaatattagctcttttccttagtattacaatagagccaatttataattattttttttattatttattttccaagcctcctttaaaaaatattcaaagaaaatttggatatatcaaaaatgatgttccagtaaaatgtcagaatgtttatcttgaggtagttattagctttgcaaagttacattaccactctgccactgaatacattctattcagttttcgcatacttcgctaagtgcctagggcagctgataagtttagcttttgtgggctttatggtgtctagatcctttctgcttctctgtgttagctgggtgctgtcgtggtgcagggcttcatagatgagtcagaatgtggaattgagggtaattactcagtttattaactgactaactgcataaatcctgaatccagtacaaacttcagtttcttttcttttttcttttcctatttttatttatttattctttttgagatgctgtctcgcactgctgcctgggctggagtgcagtggcgtgatctaagttcactgctacctctgcctccgggttcaagtaattctcctgcctcagcctcccgagttgcctggattacaggtgcccaccaccaagcctggctaatttttgtatttttagaagagatggggtttcaccgtgttggccaggctggtctcaaactcctgacctcaggtaatccgcccgcctcggcctcccaaagagctgggcttacaggcgtgagccactgcacccgggtgaccaacattcagtttccctctcagggctgtcctccactctcaaggactttccctttcttccctgacattactcgaactgttgtctgggctctggtggaagcttattgttgttatttttctccacttctcttcatctgtaactcacctgtagaccttggttgtgcctccactttgtgcagtgtctgtactagcagcatttcacagcgtgaccacagcacaagcacagatgtttccgcaattctaagtaaggctccacctcagctcccactgatccagtcgtgcccagaggctcagcatgctctccctcgggacttggctggtggagttcctcccataacctgtgttaccaggtttcctgattcgagctctagtgatacccccagctagttcggtaacaatatattctcttctaatgtattcatcctattaaaggtattataggaacactttttaaatatcttccacattatagtagagcagtaaagacataggggagagggaaaacttggactcactgtggcctagtagacttccctatctttataccctctggaaggcagtcattctagagtaccgtccatgcttgttgcaaagacaaagtccgtttatccctcaaatctttctgtggtggttatagtaaagattgtggcagtagggttggtaaggtaggttggccaggtgtctcctgggtcccacagagaattacaacacaggaaaggaaaacatagtatgccaagagacatttgatgatcttctgctttcatccttcccagcaatttattgcattcttctctttaaggaaatgggaaactatacttaagcaaatgcattctttttctatggatcattttttttttgtaaattctttgttatgggccatttagttattgatatttaaaggggtccttattaagaaaacattcatctctttgaagcacatggatttgggctttaaaaccccagcattcaaggccatccattctgccatgctctattttaaagtgtgctgtgaaaagcaaagttgatgatgacttttttggttctcagcttttgcagacctcatcaagcaatgggtggcttagttcacttccgtgtaaagcctggagaaacaagccttagagaacttgtttagagagtgagaaagactcaatacatagacatgtaagaatgaaatagaaacaaacagtaggagataaaattgagtcaacggtgattgttatgtttataaaaactagaaggattgatttgattcccaacttgcaattctagaacaattttccaggggtagcttttttaatctttcacaagctggtattttttaatctattcatttatcccaatttatcttataaacccaagctcaagccatacttaatttttaaaaacacttcttagtcattttaaaccatatttctccatctcttatgaacgactagtacaaagattagtaccgctcatttgaacatgtaatctcatataatccagtgttagagttttttaattttgttaatctcgtcctctaaattttattctaagcttcttacattctaagctttttatacacagaagttttatgtcatgcacatagtagatgttcagtaaatagtttttgaaaaaataaatggatgatgctctgatattgttatttatacttagaataaaagaagagattgaaaacagtaacacaagaaatttggtttatataaagttaaataaatatctggctgtgatggcttttataaatgaacatattgtactgataaatgtcatagaatgtagtcttgaaagactttaaagataagcgtgcccttttatctaattagaatagtttagttgaaaataaaagtaaaataagttgtatccaagtgttttaaaaaaatacatacttaaaaaattaaactcatgtgtttttccttctttatttagattaacttagtagtttattggaaacttaatgaagaatatatacaacactttccttctcaatactttacttccagattgttagagaagacagcaaataaaggtaatagtcaaactcctagaagactttgtgtatataatttagttattttcatgtcctgcctaactaaattattttaatttttgcatggctttaaatgttctatagtagaattgatttcagttataaaaatagggagtggattttcaagtattactattcaggtaaacaatatttgaattattttactgctaaaactgttatactagttatacttacacacaggctaattctttgtgaccaccctctgtatctaaagaatagattaaaacataggttactatttattaatacaattgcaaattattttaacataatttcatttcaatagtccatttgttttcatgtaatatacagtaataataatgagtttttttaatgtttcactttgatgaaatgaatgttaaaactttataatctgtttgcagttgtgggaaatttagttttaaccgggaaaaggtgaggatgtcaagaagtgattgtcatagacatgtagatcttacaataattaaataacaaaagcagcaataacagaggcatagcataataaaagttagagtagaagaagtcaaccattgtaaacatgtatttgattttacataaaatatttactttaaaatgagttaatatttatagtctaaaaatgtgaaaatacatatatggtcatagtctgaaagacatatatacaacagtaagctttatacctaaataagaacatgggaagtaagaaagataactagcacaaaaatccaaactggctgttttactccattgaaagttgcatttaattttgagttgactgagaaaggaataagatgggatatactataattcttattatgaaatgaggtaactgtactagttattaagaaggaatattaaggctgggtgcggtggctcacgcctgtaatctcagcactttgggaggccgaggtggacagatcacttgaggtcaggagtttgaaaccagcctgaccaacatggtggaatcccgtctctactaaaagtgcaaaaattagccaggcgtggtggtggtcacctgtaatcccagccactctgtaggctgaggcgggagaatcacttgaatctgggaggcggaggttgcagtgagccaacgttgtgccactgcactccagtctgggtgacagagtgagactccattaaaaaaaaaaaaagaagaagaaggaatattgaaattaatttattgtgtggttcttcaagttagataactttaaacagcttaatagatgatgtctcccaaactggttttagaaaagatccaaaacctttttaatagtattattttaaattagccatggaaacagcctggagcttagtggattgtatttgcctataatctaatttactcatatatgcatacatgtatgcatattataaatatggatatatttgtcacaaagaaaggagcattattgtttagcatttattgtatatatatttagatatgtcattcatatctaattttttacattaaagcaacaagttaaaatgtaatttaaagtgatgaataataaaacaattttcacaaatatgtttctgaggattttggctttaatgtcgtatactcatttctatttgtcaaatcctagctttgtgaaaccactgagccctgtgggtaataaaaagatgtataaaccctggatcattttctcaagggatttaccatccaagcatcggtaataatacacttgttcccaaagcaataatacaaagaatatgtgatattccatataagtgatgaaatgtgatgtcagcctgcgaatgctatttgattgtatgtgtgtgcatgaatgctgacaatctgattgaaacaacgcagtcaaaatgagtctctcactcaggaagaactataaaatcaaccagttttgttctgacacctacaggatatcagttcctttatgataccactatttctgggagcagacacacaccttgcttttgcacatgcagttttcccctggaacaaaggagatggttaggttttgtgttctccaagaaatcctggggggggaaaaaacagagaaaattgaagtatttatttataaaacatgcaaactattttaatacaacatcctgattttacaaataaagagaaaagaaatcccttaaaggtataaatgacttcaattatccacagccagcacagagaatggcttgatcctcaatcagttgtccaacttaagtagaaaaaaactttaaaaaatgtacattgggggctgggcgcggtggctcatgcctgtaatcctagcactttgggaggccgaggcggatgataacctcaggtcagcagttcgagaccagcctggccaacatggcgaaaccccgtctctactaaaaatacagaaaaagaaaaaaaattagccaggcatggtggcgcatgcctgtaatcccagctagctgggaagctgaggcaggagagttgctggaacccaggaggcggagactgcagtgagctgagatcacaccacttcactccagcctgggccagagagggtgactccgtctcaaagaaaaaaaaaaaaaagtgtacagtacgaaaaaaaggttttgttttgttttgttttcattaaaaactactttcaggtcagaattttatgtgctttaaaagttattttgaatgtgctagattattgtttgcattctttcctctaaatacacactatggtcttttattacaaaggaaaaggatttaaaaattaaggactataactttttttttttttgagatggagtctcgcactgtagcccaggctggagtgcagtggtgcaatctcggctcactgcaagctccgcctcccgggttcatgccattctcctgcgtcagcctcttgagtagctgggattacaggtgcctgccaccatgcccggctaattgtttgtatttttagtagagacggggtttcaccgtgttagccaggatggtctcaatctcctgacctcgtggcctgcccacctaggcctcccaaagtcctgggattacaggcgagagccactgcgcccggccatttttaaatgatgttctatctccccaggactggcggtttctgtgtatgagagacgtcatttctaagatagtgagtgtcccactgtttaatattttatgattagaggaattcaatgtctgtcattttaaatgtagaaattactgttattaatggtaagagtctttactgaatatgaacaaaatgtattaattttacttggagtcaaaccactatatttttttgtgtcccaggaatttattctcctatgtacccaggaatttgttctcttatatcaatattcatttttttcacaaagaggaggcattttataagaaaaataatggaaataactagtactacttcctgggcaaaggatatggtattgctgagatggagctaataattggtgaactggctatacatactggagctgtgagctgttgtgtctttgaatgagagactggactcagattaactgattggcaagtatacccacaagtatatgagaagtcttggctgaaaattggttagcaaattgataatgcctttgggcaattgatgtgaagatagagtttagtgagttcagggagggtcaatatttttaattgaattgtgaatgacaacaggagtcaggtggagaataacctaaagcttgttttatctaaagtcatttaaaaggctcaaggcgagaaataagtttgatgagtgctgagaacttgggaagtatcagtgtgacgtggatttgttctagaggtgtgatgatggtggtgaagagagaaactgacatgaaccttggaaggaagcaagagccgggctcagcatcttctagcattgtggtaaaggttaataaaagaaggcaattaactagggtttatttgagaaaaggaagaggttagaaaagaaggtctaagtgttttaaagtttgagtttaaatgcctacaatgaaaaatcttccaagtcaaaaatacttgagattatctccatgaaaacttacttaaaaatttcaaagttaggccaggcgcggtggctcacgcctgtaatcccagcactttgggaggccgaggcgggtggatcacctgaggtcgggagttcgagactaaaaatataaaaattagctgggcgtggtggcaggcttctgtcatcccagctactcaggaacttgaggcaggagaatcgcttgaactcaggaggcggaggttgcagtgagctgagatggcacccctgcactccagcctgggcaatacgagtgaaactccgtctcaaaaaaaaaaaaatttttcaaatttagtatctttcctggatatcacgtagtttctctattcctaagaaattctgtttgataacataacctgtagtgatgtatttgtgcacttctgtggcatttgttttttctcattttgtggagaaaatatctatatttttattttcaccattttcttaatcctatatgagatttttaaccatggcaaatgttttcttttcttcttcttctttttttttttttttttttgagacagcatctcattctgttgcccagactggagtgcagtggtgcagtcttggctcaccacaacctccacctcccaggctcaagtgattcttctgcctcagcctcctgagtagctgggattgcaggcgtgctccattgccacccgaccaatttttgtatttttagtagagacgtggtgtcaccatgttggccaggccggtcttcaactcctgaccttaaatgattcacctgcctcagcctcccaaagtgctgggattacaggcgtgagccgccgtgcccggcccaaaacttttattttctgagttataattttttaattgactacatgcagtattaatttatttatttgacccaggctatctggggtattaatttatttatattttccattgctaggtaaggtgagctcattcatgtatttatttattttaaaacatctttggagagtcaactgtttaccagtcattatggtagcattatgatagaaatttggttcatagagatgaataaaacactgtcttttcctgccaggaactataagtttcattcagagaagttacttatgcagattgttccaatacaatttctaattataaccatactctcacatttggaaataatttgtaaacatgaggtaatactaatacagcacttcgttatattatttgactagtctgctttcaatttatagtgatttcttcaatgataaaatattagactatagcttaatttcaagcatgtttgatctcaaaggaagaactatgaataaaaatacttctatgggcttaacacctacagggagtttacattacaggtgtttagcctggatacgtcatttgatccttctacacttccttttaattacagagcccattatgcgttaatatacattattttgtagttacttcagtaatttataatatgtcaaaattgagtcctgaatatgtaattgccctttcctctgaattataattgtttcttaagtttttttttttttttgagacgtcgtttctctcttgttgcccaggctggagtgcggtggcacgatctcggctcgctgcaacctccgcctcctgggttcaagcgattctcctgcctcagcctcccaagtcctgagcagctgggattacaggcaggctccaccacacccagctaattttgtatttttagtagagatgggattccttcatgttagtcaggctggtctggaactcccgacctcaggtgatctgcccgcctcggcctcccaaactgctgggattacaggcatgagccaccgtgcccagccttgtttcttaagttttaagagtggacaaagtctttgctaaaagatctcttatgctcattggattgttgtttttacaattttgacattttcacatgtaccaaatttgttgttttggttctcattagcaatgatgcaagattcccaattccagtcatcttgttattgaacaaataatgttaaaatcataatccgattcaaaaatttatgttgtgtgaagcatatttacttataagattctttaatgaggcctgaccagctctttcgagagaaaaccaaacacagtgattcacacttcataaacagaccttcaatctaaatgaacttggatcatatgtgaggtcactttgttgttgtttgttgttcatcttctcagcatctcttcgttattgccagaaaactttggtgtgcagcctgcatataatcagggacagaaaactgcagcataggccaccttaactgaattaaaatgagacagtgcaatgcaatatgcagaattacgcaagacaaaaatatgaaattggcacacaaaatgccctaatagtcttttatttgtgcaataacatagatatgatttgtctattatattctaatactcttctgtaaaaatcagtgtttccatatgaagaatcaaagacacctggtcgtatttaacattctgttggggagagggaaacaaaacaagtgtatttggggtgtgtgtttaatattataataaacatttaaaaattatgtaagctatcatcataggtatgtaatccttttttcataagtctgagtatataaatttacatttagtgttaaaattcagcatggaaaactgttataatttttgacagtatttgaatgcaaacagagccgtttttaaactatcttgaaatgtggacttagaatgaaatgagtaacatgttttagtgtaggtaacaaggttatgtggtaattgataaacagaaacccacaatctttgttttaaaaaacatataaactgttcattaacaaagatatgcttttacacaaatatttacaatgatcttctttcttcttctgtttgacttcctacattgtcccaaatttcaattatcttatttttcagatgaaatctgtgacagtggtcaaggtgtactctgacttaatcacaagcatttagtgcaattcagagaacaatagattctttctgatgtaaaattcttggttgtcatgttgctagtgtgctatttgtgaccagaatggcaagtagttttaatccatacgtccttttttctgtgctgggatgcctgccaaacctatgtctgcggttaacttttgaggttgtcagttggagacaaatttaggagcaggagaacttaggacagtggatttgtagttaatgcatatgtcacaatagcattgcctttcagaattagaaaacaaatagttatcttcataaacttaacctttgctgagcattatatttatttttttattattgtttatttattttttatttttttgagatggagtctcgctctgttgccaggctggagtacagtggcgcgatcttggctcactgcatcctctgcctcctgggttcaagtgatccccctgccttagcctcccgagtagctggggctgcaagtgcacaccgccatgcccagctaattttttgtatttttagtagagacggggtttcaccacgttggccaggatggtctcaatctcctgacctcgtgattcgcccgcctgagcctcccaaagtgctgggattgtggtgtgagccaccacagccagccacagttattgttttaaactgccctatgctgttcatgtaaatctgcaataaatttcatgtaaacttgatttaattaaatatgttgaaatcatattacattcttataattattcatggtattcaaatgtctaaaaattcctgctctgtagctgggggtgaaagacagcaacattgaaaagcacttgttatctggttttctttcctatttcttgaacatttactatgccagaatactatcctaagcattagccatgtattatttcacttaagcctaaacataatcttttaaggtaaatacttttactaacacattttacagatgatgaaagcaattctcagaaattttgtgacttagtttgaagacaaggtagcctgatttcaaagggcaggtccttgactaccacgatattaattttctactgctgttgtcacaaattaccatgaacttagaggcataaatgatacaaactttatcttactgttctataggtcagaagtttccctcctcttctgtcatcacgtcttcatctgaatgacctgcctttttaagggctcttgggattgttttaaactcacccagatcattcaagatgatctccccatctcacgattcgtatcttaatcactcctgcaaagtctttttgccatgttgagttaggcaacattcacatgctccagggatttggaagtgggcatctccaggggagtcattctgcctatcacgattattatactgacttttgacagtgccttccttttaaaatgagtggtattaagggaggtaagttggagaatgtattactactctcatctgtgaagagctccaaagcgatgattcagtattaattgattagtcagataaatagtaataccatttaaacacagcaactgactttgtttaaaagttagattatacagaaataaaaaatataaaggactttaaaaagctgcatacgttgtatggcaaggaattcatcaccataattctaactgataaatattaatatagttatgaatttaaaataaaaaagataatgacaagggctcaggtgaatagataaaatttttcattttaaatgttttattttctgcagaatgagaaagcccttacattaagaaatacttgaactgcatagtactttattctttttgaaaaattttctaatctatgattccttttgatttttaaataatcttggagttaatagaactggaggctcttaaaactactttataaataattatctctgttgaggtctggaagctaacatgcattgttttactgtttatgttttggccattttaaatttcaagtttgccattttatattgagttgttttataacctgctctaatatttgtaaagactagatgaggtattaatcccaataaataaaataccttaaatcgagacatgaagagccttagcaaattcctcagagtcacacaactgattagtaatagagcttcacctgctacttggttcactggacatcagtctaaagtggttactgttgggcccaaccacctcccaaatctaagatagagattagtgagctattggccttctgattttattgcctgtgcaggttcatgtgtgtaatatactaattggcaataaatagttgtctgttggtgtgatctacaccatcttggtttggttttggaagaggaaatttacatcttataaagctgtaaagtatgtctccaatatgcaagtaggcagtgatggacgttgatttgacaagcaaattaaagcaatatttaatactatgctgtaagccttttccaaatgaactgaacattttttaccttaacatttactaaataaattttgtctctctcgatatatctctctctctcaatctcactcacactcttatacacacacacacacacacactcacacacacgtgtgcttgtgcaatgtctttatttgtaaaagtaaaagttaaatgttttatattatttctgtgacttaggcagatttttggtttttgtttgtgtttttgtaaatctcttgtagagatcttaacagggagcatgctacatacaggaacattaaggcacatgtggcttgataggttttatcattgattagatatattttaatctaatcaaagtttatcaggcaccactattatgccatctcaatgcaatggtgagcgtacgaatttaggaaaagaaatctagctgttcttgagcctttttaattagttatttagaaaagtattggttacactctaaataactctataaataatattttcttagaaaatcatctttagctggtggtggcatgcaataaccagtgattatgaaaatggaaataaatctaatgcaaatatgttttttatttattatttagtaagtaaattaaattgtaagttatgttttctttagcctaatatataaaatggctattttaaaaatttaaacttcatcatgagatttcccttataatgtaggctaataagtctctatgatctttcttctagaaaccactggcattagtctgtaaattacagggtacctatgcattagcaccagcaaatgttattgtaattgccagaagcaccatcagcaaagtaatactaatgtcaacattacatcagtttgaaaagaaaaatatgtgttgactaagcaaatcaaaataaacctttccatatttcacatctaaattcttcatttgccttagttataaaatatagattagttcttagtttttttaaagagtataattacagtgcattatgaaactataaggaattgttatttcaaataccaatttactcaaacaatagaatagtcagaaacataataattatcttatttgttaaggtacattaatggttattggtacctaggaacaagctcatcagtatttttgtgtgacctgaatccctcattttcataaaatgtatttaaaactttgtctacatactttagcaaaatactctgttttgtttctggtagcaaatttaattgctaacagcacatggtttctttctttctttctttttttttttttttttgagacagagtttcactcttgttgcccaggctggagtgcaatggtatgatctcggctaactgcaacctccgcctcctgggttcaaaggtttctcctgcctctgcctcccaagtagctgtagctgggattacaggcacccaccgccacacccagctaatttttgtgtttttagtagagacggggtttcaccaggtgccaggctggtgtcaaactcctgagctgaggtgatccacccaccttggcctcccaaagtgctgggattacaggcatgagccactgcacctggccggtttcttggtttcatacaagacgaacatgtgtgccatattgttttcaggcacatgggataagttggcatgggaaagtttaaatttgtcccctgaaactttgataatttaagtctataaaacaaactgatagaagattaacaggaaaaaaaggcatacaaatttattagcttgcatatatagtcacaggagtcatacaatatatataagctcaaagaaggtccagatggtggacgcttaaatatcctcttcactgaggagagtggagatgacaaagagtgggagtaaattttttttcaggtgaaataaatgacctcccccccaaaacaatggcgtgagaccaagtttctctgggcttagggatggcatcacagggtcagggacagtaaggggaggtaagtatgtgaagcaaagggtggcttattaagcggattaaaatgtctcagattatctcagagctgccctcagaaagaatagatggtagcctgacatagagttaatctttcctggatctggacaagagaggagccacagagaaagcctggctgtttatttcacaaatatagatttttctctatagatgcaaatctctttcacagaaggcagcttttctgaactatccccatctgcaggccctgttaatagtcatccgaaagtatgtcaaagtaatatattttggtttttttgtttgttttctttagtcccccattcgaaactttattttcaggaagttttacatattaaagtgggattggtacctttggagagatttaggctagaggttgtgagataagagataggcaaaggggggggggaaacaaagattgagataagcagataaaaacaagtttgagtaccctagtttatacattcttcaatctcctagtcctgagaataggtcagtttgttaaacagctatgtctcattcttggagttggcattgcagattggctcccatcaaggttaagtctctgtatggcataatcgtctctatatggtgtaagcatacaccatatttcacaagagatttcacaagagatttttctgtaggagcatacaaaaaaaggttgatgtttggagtattttaagctagtttttctagaaactctgaagcatcttcagttggaactggcaagcggtggcaatctgacagattttcctgggttgcactttgaatcaggtattccagtgaactttctcggtcgtccatacatcaacaggcacaaaggctgatactcagtttctgtagtgatttccacagaggtttacatcaaggtgtcttccttcagtttgtaggccttcaacaagaggacagttttaatttctaatgattttaaatcagaaaaatggaagaaaaatttcaactactcatttggaaagttacagtcaggtattgaaagaaacttaagttttagaatttagttgagttaataaaaaactgaaaaacaatggatagggctagaatctattaactggtacaccttagatttcttctgaaatgtattttttttctctccagtccctcatctacaaaacatatttatggcaagttcaatttatttgtgaaacaagtttagtttcattaacttggcctaattatttgcagaagtatagtagaaacagtgatttaccatatagggtttttaaaagttaccttgctggaacttttcataagaaatctcagactggacttctaaaagagtctctaggttaggaaaccaggaggaggatttgccacaccctcaaacttgtctgtaacaactgtatgaattgggtaaattcctctcttctcaaggtctctaaaatatcttgaggttctcagacctgtcaaaaagtagcattttttaatttaacacaaggtcagggactttataagggaattgtataaacaagggaccaggttaatctttccaaaggactatttattggctccataaatcaacctcagtcactcaaagcaatctggatatatctgaaaatagcacatcccagtcaaagccttaataaaataactggtatttccaattgtgtttgttacagaagaaaacagattctattgaacttatgcaaataactatactgccataaaataagaatactcatggatagttattgaatcctagataaatcaggtagagagaaaggtaaatgtttcaattttgctctcaaaaacatactttacccaattgctataaactataaatagcttaaaagaaaagcctaactctagaaaacaaaacataaaaataatcaatgttttaaacaaaacagtcataaaaatcatttcagtccttcattagtttagtgctgtgtaattaattcttgttcaatttggtgttaaatctcatgatgttaggttagcaatattatgtgtccagttttttttccattgaatttcttgaaattcttacccagctcaattatatgatctcaaacttgtcagaaactgtatttaagagtatttgataagagtgtttgataagagtatttgataagagtgttttccataaacctgcttgaacacacactttaggatttgcaaagagcttttggaagaaaaaagaaagcatcagtataaagcagtttaccttggacaagacttaaaataaccatggttaaagacacaattgacaaatcaacttatttattttctgtggcctatagcaatttaacatatcagatttggagcacatactaataacctatccatacaaatataactcaaagaaagttaaacatttttatttgacagtgagtgcttcccacataatttaacatatgaaataagctttttattctctttctttttggagcattaagggccctcgatagcgctccaaagttagtttgtagtaaaaagattgaatttagaatttgaaacttgattttgggaagcttgtcaaatatgtcatggatttaaagcacttgatcaaaatatgatccccactcactgtgaaataatagtcattgactttgccaaattgataactaaaagatttcagaaagtgaagtcctttgctctttgacagacaaaagtctcagtttctgaataactcaaggacttaataaacacagcaggaggcacacaaaatctgattctctttctctcccatcatttacctttcctgcagtttgcccaaaaatgagcaaaaatattttcttatctcttatgacaccaaaatggtagggaagtttaagtttttccctgaaactttgataatttctgtctataaaacaaattgataatagattaacaagaaaaaaccatacatatttattaatatgcttatgggcacagaagtcatatgaaatatgaaaactcaaagaaggaccagatggttgacactaaaatactcagttcgttggggaaagtgtagattaggaggtgtaggagtaaatgattttcaggggaaatgaatgaagccaaagaacaatggccttgggaccaagtttccctggaggtgggtggcatcataggttataggacagagaaggaagcaaatcacatgaagcaaaggcttgttatgcagacgatagtatttcagataatttcaaagctgccctcagaaagaatagatggtagcctgaagttgagctaatctttcctagttccagagaagagaagggccaagagagggcccaagagataaatcctggctgtttatttcactaatataggtttttctctacagaagcaaatctcctgcacaaatggcagcttttcagggttattcctctctttaggcccactaaatagcaatagatgtcaagtacctatattttggggtgaaatgcttttttttgagatggtctcactctgtcacctaggctggagtgcaatggcacacccacagctcactccagcctggacttcccgggctcaatgaatctttccatcagtctccctaatagctggaactacaggcctgcgccaccacgcctggctattgtttgtattttttgtagacaggttttccccatgttgctgaggcttgttttcttttattattaatagcaagtgactatagctaaggtcatggtatcaaaaaatattcatgtctttcttacatatggaatgatattggttataaaatataattttatacccatagttttccatgttttcctgttatgttatatgttgttattctacttaaaaactactaagccagttaacagttttaagaagacaaatgaatttatggatgctattcaaagtcttcaaatgagagagattaaatgatttttagttgattattcacttaaaagtagtttcagtttgatataattcttagtaataagaaatggcaggcatttatttgtaggctctatgttagtatgtgttcaataagagacaacagataaacactaattttctaattttcagcctaattgttaaggcatcaggattaccataaaccaaagcataaaagtacactgtagacatattactggaatttggattttgtcagttaaaaatttaagtttaagagtagaatgggtgtataatgttagtttgagtggactgattcattttgacagatcctttatatactacatacttgaagttggaattttagatttacttgagtaaaattggaacatacatggaagaatggtttaattttttgatagtgttgaagcagaacattctctacctcacaaacagaattcccattttaaggatatattaatgtagacaatctcaacattttgtcttgtaatagctgattaagttaatttattctgctttgcacatgctttgcacatgacattatgaaaaatgggaagaaaatatattggatatgatccctcctctgttctagccataacccatggtttaccttgagttgcttctgttcacaaatctcttgggaatttttctgctgctactgttaacttaccaattagcatgatctaaatctaaattcatttaaataactgacaaggttgacatttatttccacataagaatgatacagatatatagaaatattatttcagctgaaattttgtatataaaagaaaatgtatacttactaattagatactttaaaatgttttattctatgaaagaaaaaacatatttgttgtttagaaaatgcaaatcctggctttctactgtcactctttgatatggtttggctgtgtccccacataaatctcttcttgaactgtaattcccataacccccatgtgttgtggaagggaccggtgtgaggtaattgaatcatgggggcagttaccctcatgctgttgttgtgatagtgagtgagttcttatgagatctgatggttttataagaggccttaatccccttttgctcagtacttttccttgctgctgccaagtgaagaaggatgtgtttgcttctccttccaccaaggttataagcttcctaaggcctccccagccctgcggaactgtaagtcagttaaaccactttcctttataaattaccagtctcaggaatttcttcatagcagtgtgagaacagaccaatacacttctgaaatatactgattcatcaaatcccatttgactgtagaccaaatgcaaactcagtgtttgtgatccccaggtttcaattagcatggctctgtgtgaggaatacgaaggccgctaaaacatggcagaacctctttcttctacaggaagaccttcttttgatatgtataatcttagaattgtaaccgtttgaatcacctttccaacaatatcactaaagggtatatttcttgatcagagaaactaagacttaaaactataagatttgtttattctattaataatccccataaagaaatatatttctctcacttgttatgtagactatatgacatgtagttaattaagaaagtacatgtaacaggcccatttttataaacttatttcttctaactatatgtttgcacccattaaccaacctctctttatccttccactacccatacaccctcccagcgtctagtacctatcattctatggtctaccttcatgagatcaagtttttaatctttcacatatgagtgaaagcatgtgttattatttttacaagatttgcagttccctcgaaaaagatatcccttaataatccaccattgggaaagaataagttctaatgttcagtagtagagttgggtgactaatattaacatcaacgcattatatatttcaaaatagctagaagaaagaacatgaaatgttcccaacacataaaaatgataaatgctccaggtgatgaacaccacaaatgccctgaattgattattacacagtctatacatgtaatacaatatcacatgtaccccataaatatatgcaaataaatatttgtatcagtaaaaaatgtaacttcagggcaaaaggactatattcaaatgtgtgcatattttgaattaatatttaaataatcatttggatttttcgtgtgtgaaaacattacaaatggaaatgagaacatttttccaggaaactcataacttttttgccgtagacatatgcaaatcactgaagttgccggagggtcacttatgtgattctctctcaagtacagcactaagtgttaggattgcttgttgatacctaatcctcagtcaacatcataaatcagcacttgtcagatcagggaagcatattaactagagttattatatttcaaaacagttaggagtgttttttattctgacagcttcccagagaggggactctgtgatgagtagctgcggatatttcataccagtgaggaggatacacattgccagttattactgttaagggcaaccttcgctagcacattgtaattctctctacagtcctctattttaatttctgtcataccacaacgttatttactcctcttactaggctaacagctgccagccatgaagatttttatagagttatagaattttagaaagagggaaaaaactgtagaggatatcttactgaatctttagtttccttttgaagatactgatgcctttttattattaaagactcatgaagctttggccgagagaagatgtttaactcactttcttaccattacgcaactgactcctcactgccagtttgagttctggtgtcctactcattctctctgactgaatgaaccatgactttatgtgtgtgcgtgggtgtgtataattatttagatatatgaatatatatatcttttccagtcttactgtactggtttgcattacagtattaaaccaatggaaacgtccactatagaaatgatgcaatattctatagtaagtgctcacaaggatataggacaaacctacatgtccatcagtagatgaacagaaaatatggtatatatacacaatggaataccgttcagtcttaaaaaaaaaagaaatcttgtcattcacagcaacatgaatgagtctggaggatattatgttaagtaaaataagtcaggcacagaaagacaaatattgcatgttctcattcatatatggaagctaaaaagtttatcttagaagtagagagtagaactagaggctgggaaatgtaggtgggtggggtgatagggaaaagttggctaatggctacaaaattacagctagttaggaagaataagttctagtgttctatggcactgtcggtgactctagttaacaagaatttattgtgtatcttcagatagcaagaagagaggattttgaatattccaaataaaaatcaatgccaaatgtttgagggggtggatatgcaaataacccttatttcatcattacgtgttgtatgcatgtatcaaaatatcactccattgcccataaatatggacaattattatgtgccatttaaaaataattataagaaagaaaagactgaaaaacaacaacaaaacagaaacacaaagaaaagaaagagctatcaattgaaaagggtttttctggtaaattcacatttacaaagggtcatataagaaacatagaacctatgatgaatacaaaataagatcatttctctgtaagaatattacagaattagtacagtctagcataaggtaagtcttttggacggtgttgacaacaataaaaagccacttggggaagccgtgttatgctctcaacagaattttttcactcattaattgtataagtagctgattttaaataaagcaactatatagggtgctggtgacagaaggtgggcagacaattctctttaacttctttgagagtgattttaagaagagatggtacaagagcattaaaagtggaattaggtgaggagtctttaaaccattacctcgtataagtgcttctcagcttccttatctcaacaggttacattaaagagtagtgcctgaacctggtgggaacattttattatgcaggctttgaagtagctagaacatcgtggtggtggtgtaaggatatgaatattttgagtttttcacaaagtagatgcagcaaattgtagatttgtgaatttgactttgcttcagggaaagacgtcagaatatattatatagtaacagagagagaaagcaagagaaaagtgtatgtgtgtgtctattcacaaacacttgtcctgaaagacaggggatagatgattattctgatcttggttgacttccttgttagtcatcagacaaataattagggaaattccatatacctggtatatcaagaatatgagaccagcattgaatcagcttatcttgtggctaagatggagaaatatggacacaataaccaatttgtaacaggttgaatgacgatgccaactttcgttaattttaagtgcagtagaacccttcctaacatattttcatgtttcttctcaaactataacacatatacaaaggcagggattatactatctataaagaatataaagtttggaagatgggtcaatctgactctacatcaatagactgctctgtggaataaatagaaatatctctacttgctttctggggtgagtgagggtttctttcttttgctcatttttgcccaagctggagtgcaatggcactgtctcggctcaccacaacctctgcctcccaggttcacacgattctcctgcgtcagcctcccgagtagctggtattacgggcatgcaccaccacacccagctaattttgtatttttagtagagatggggtttctctatgttggtcaggctggtctcaaactcctgacctcaggtgatccacccgcctcggcctcccaaagtgctgggattacaggtgtgaaccactgcgcctgaccttcatattttgagaaattaatttaacagatataagcctcatttttctgaatttagaggtaaatattaatgtacaaaaatctcagggatttttcttttcagatatcttaaattctttgagctttaatcttgccatctctaaatgaggaatgttgccaactaaaaaatgaggtctgaactgctcccctcaggcccttcatttcccagagcatctgttatacagtgtttatgttaagcacctgaaatgggctagaggttctaaaataaggaagaattggtgtggctaagtaaacagaatgcaagagttgtgtaaatcttattttctgcaagaactgtccttgattaataggcttaaataacaacataatttatttatctcagagaacatattactgtactttatctgtttgaaagctttataaaaggcaaggaaaagaaaagaaaatgtgtgaaatccaaatatcaatatcatcattcaattttgttgtaacatgtactgtcaatataacttactcaagcatttatgttttctaaattattagactaatgaaatggaaggcattcttttcaaaatgtcaaatttcagctaatttacaagtgcaaattttatctggttaagcatttacatatcaagccactataagatttaggggaactgcttattcctttagtcctgccccatgccctctataaaggtctttctgttaaagttcgtgccattatcaaaaacatagtaattgagtttatataggaaatttaactcagtggctaagaaccagggctctggactcagtataactaatatggaattatagtaacacaggtcagaatctaggatgagtaatttaatcatatgtaaaataagaattgttataataatatctcatggggttattttgagaattagatgagataatgtatataaattggatagccgcacatatggcacctaataaggagttgttgcttttatattacccttttattcttttttcaactggcatggaattcagaaggtagcttttgttttaaagacaaaaattatttttgaagaaataatattatatacaatgttagtaatttttatttttgttagatgatgttatcaaattatgttttcatttaaaaaggaaagtataggtgggcgggtcacaaggtcaggagatcaagaccatcctggctaacacagtgaaaccgcgaatctactaaaaatacaaaaaaaaattagctgggcgtggtggcgggcgcctgtagtcccagctactcggtaggcgtgacaggagagtggcgtgaacccgggaggcggagcttacagtgagccgagttcgtgccactgcactccagcctgggtgacttgtgagactccgtcaaaaaaaaaaaaaaaaagaaaaaagaaagtagatatgtgaatctttctttgcaaatattaaaataatttaaaaatgtagattatgaaattttaaacagactttactggaatactccaaatcaaggatatttgaaaattggttttttaatcattttagctgtagaaatcattttatttgaagactttgtgtgtgtgtgtgtggcagagagagaaagaaagagattattaatgagagcagttactgcaaaacatactaatacattttacctaccaaaatatgaatttcagtcaatatatcctaagggtatgtatttcatagctttgaagatctttaaaagtatcttattgcaggtttgtgttcaaaggagttgatcttttcaagtctatggaagatcttgaagagcaacagaagagcagggtttgtaagggtgtgtttcatagcttcgatgatcttgaaaagtatggtcttatagcagatttgtgctcaagagttaatcttccttttcaagactgtggaagatcttgaagagcaacagaagagtagggtttttaataaatggttcctctttgctgcaatatttaatatttcagtattgcatttaagaatggtaactatggttcattattataattcagaatgctaattaaatctttatattgtataaataactagtctggcttcatatttaaagtctttctgcccagacaattaagatttttagatatattaaaaccaaataaaaatgattcatttttaaagaataaaaataaaagaattatgttctgtaaatgtgtgaccatactattgttttttaaaaatcctgaaaggatatggccagatatggcagctcatgcctgtaatcctaacattttgggaggccaaggtgggaagattgcttgagcccaggagcttgagaccagcctgggcaacacagggagatgctgtctctacaaaaataaaaaaatttgttgggcatggtggcgtgcatctgtggttctggctacttaggaggctgaggtaaggaggatcccttgagcccagagagagaccctgtcttaaaatatgcatgtttgtatgtatgtgtatgtatatatgtatacacacacagatacaaatatatatgtgtgtgaatgaaaatacatatatatctatatataaaaacacagatatataaaaatatgtgtgtgtgcatcctgaaagggtgttgtaaatgtcaagaataaaaatcatccagtttgatgtattttatagtgcatttctagaatgtacatattttgatacttaaaactgttaacagacattaacaaaaaacatacagaaactttaaaagattatcatagtggagaaattcaagcccactccagtccactcctgatgtcacttcagtctgctgttaaaagtgaaacacagacaaggcaaataaataaataaataaaatacaaatatcataggattttttcctcaagaaagttgatatgcaattcctgcctcagaatagatagaaactaggctggggttatggaagctcatgcctgtaattccagcactttgggaggccaaggtgggaggattgcttgagctcaggaattagagaccaatctgggcaacatagtgagacccccatctctacaacaaaatttataaaacaatatatggggatgatggcccacacctgtcgtctcacctactcggaaaactgaggcaggagggtcacttgagcccaggagcccaagaatacagtgagctgtgatcacacaaactgcactccagcctgggtgacaaagcaagaccctgtctcagaaaagaaaaaaaaggaaccagatgttagtggagcacatgagtcaatgttctgtcatctgataccctggcattgaatattaaagtaggtctatttaaatgggaaataattatctgaaccttcagcttccttaaattcaacgtcataaaatatgtcacatgatgttagccatattcccttctatcttagatatcttgggaagtgttgctgtctttcaagactattctctctgacatatctgataaaccagctgtagagcaaatttgtatcagatatgtatctttacaacttctggagccacactgcctggattcaaattttgatagcacctcttgccaagtttctgactttgagcaagttacttatctcctctgtggctcagttttcttgcctagtaaaaggcttatgatcataatgatgcttaaatccaagtatgggcatgcaggctaagtgaagtgatatatgtaaagcactccgaaaaactctgatctctatagctgttacccatgttttttatatagcagtgtctcatgatacaagtttcttcatctgtattcagcaggacactgtgaacttgttggcagcaaggaaactgttgttacttatctttttgtattgaaagtttatctcagtgtcatgcaaatggcaggggattagcatttgagttgttgttagacttaattttaaaagtggttcctgcagtttcataggtattataatgtcaaattgaggtcgaatatgtgacctcaatgaccagtactaaattttgttcaagattctattggattatctgttcaaaatacaagcatttaaacatttaaatctcaaatttcccccatataacatttgtttttcttttaaaacagcttttcaaatatgtccttttcaaccaacacttccaaccaacacttactgtcatactccaaactgttattttacagttttttctttctatttttgcttcaccattttggcgtcacctcttggttcaggttttcttgccagcaccaaaaactcctgtagcttatttctcagttatgtgactgcattggtactgcagttcagggaaacttaattcttactggtttgttttgttttgttttgtttttagtttaataagagataatgtctgaaaggacatgagcaaaagtaaagaaacaaaaatctagtcctgctgcttgacaaaatagtatgagaaaaaagcagacaagcaccaaaccaaacaataatagcaaaatatctaagaaaatttgataattgttttgtcagaatgaaaactttttctctaagtgatatttttcagttattttattctccctaattggtacatctcctttattgtattaaataagagaatctgcctaagtgtttatagctgctttatgaaacagcttattttccttttttttgagaggggtgtgtgacatcacttgtgttgtgtacgagttagagaagctatgcaattactagtgaaatagttttattaagtttgctttaaatgataaagattttacttggaaacactctaaggatgtttctgtttttactggggtatttaagacaatgcttgtaagtgttcaatgatttctttgatataatttagtgaattttggctaaacacatatttttaaaaacaacaattatttgaaaatagaaaaatatgccagaaagcaaaactggttttgctaatgggttgctatttagattctaagtattcattaaccaggaggtggctaatgagcagatgtttaatgagcaacagaaatgaattgacaggtttttttgcttgtttatttcagacagactaaaggtacagatatgttgatgaaacaaacaaaaaagaaaaacaagaaagtattcaacttgatgagacttaaggaaagatgttctagtaatagaattgaatatggtgtggaagcttgcattaaaacttcagaaaaatatttctacaactgtagggataaataaaactaatacacaaagagcactaatagttaaacttattgaaagaaatgtaatcaactcatattcaatacattatgcattgtttttttctttcataactcattaacttgctaatggccattttactgcttattttcaggggtaagaagctgtgtggatttttgttctgtttgcttttgagaactaagctctgatttttttcatcttgcccaaattcctccttaagaggtctgggaagtcatgtcctacaaatcataaattctcatcacatggattttatttaacactgtatgtcataacttaatttccaatctgactctggtataaccaggaagaaatcaaaatgttttaccccaaaatatatttccttggcatacaatgaaattgtcctgcaatgtctcttgtgggaaaaatccacattctataaagaatcccctttcccctttgttttccttctttcctttccaaatccaggagataaatcaactaagagccaggcacccttttaagtccaataagaaacattttacaacctgctctctctgaagtctgctatctgagagcttcctctgtacaataaaacttggtctccacaatcctttatcttaacctaaacatttcatttctattaatcccaggtcttcagataaactcaactagttgtcaatcagaaagtgtttaaatttacccatagcctggaagaccccctttaagttgtcccccctttctgaaccaacccgatgtatttttttttttgagacggagtctggctctgtcacccagactggagtacagtggcgcaatctctgctcgctgcaagctctgcctccagggttcacgccattctcctgcctcagcctccagagttagctgggactacaggtgcccgccacacgcccggctaatttttttctatttttagtagagacagggtttcactgtgttagccaggttggcattgatctcctgacctcgtgatccacccgcctcggcctcccaaagtgctgggattacaggcgtgagctaccacctggcctgatgtattccttgaatgtatttgattaatgtctcatgcctccctaaaatatatacaaccaagctgtactccaaccacctggggcacatgttctcaggacttcctgagggctgtgtcacaggccatggtctctcatatttggctcagaataaatctctaaaaatattttacagagtttgactcttttcgtcaacattttttagatctgtgtatcatgcattcttctttgttgggtttaattctcctgaccttagatttctcatacagtttgtagctctcataagataatcacaaagaaccaaaaaacaaaaagtattaggaaattttatatactttctatttactatttatatttactattaattttttttttttttttgagacggagtctcgctctgtcgcccaggctggactgcggactgcagtggcgcaatctcggctcactgcaagctccgcttcccgggttcacgccattctcctgcctcagcctcccgagtaggctgggactacaggcgcccgccaccgcgcccggctaattttttgtatttttagtagagacggggtttcaccttgttagccaggatagtctcgatctcctgacctcatgatccacccgcctcggcctcgcatatttcctttatttttgtatataatttatatgctgatacaattaaactatactgattaaataccctataatgatcaaattctaacataatttttcatgcccataaaacaccactacattaggcttctaattacatgtttgattctttttaatagattcaataattgatggcatagacccttctgaattgcctaataaaaagagcatgaaaaattagagtcagccactgactatcacactgactactttttttttttaaatgttactataaggaatttagaagtcttccatttccttttaatattgttgttagccaggcgtgggggctcacacctataatcccagcactttgggaggcctaggtgggcagattacctgaggtcaggagttcaagaccagcctgaccaacatggagaaaccctgtctctactaaaaatacaaaattagccagtcatggtgatgcatgccagtaatcccagctactcaggaggctgaggcaggagaattgcttgaacctgggaggcggaggttgcagtgagccaagattgcgccattgcactccagcctgggcaaaaagagtgaaactccatctcaaaaaaaaaaaaattgttaatattacatcattatgcatataaatgggtttttgaagatgtaaatagtataaagtggaaatgttattgttgggttaggagcatttgaagatagcttgattcatttccttaggttaatggacacacaattattattctacagtatgcatcagatcaggtgactgatcaaatgacttctcaagttgactaactagactttgcaaaatttgaatgtttttttcatttcacattaagcactgtaaagtgcaaaaaaaaaaaaggtttttctctttagactctgttttaatctgatgtactcctcgatttgcatttcacacactcccttaatttgtaccagacctaaaaaagtgaaaggattaactttcttaaggatgcactggagaaactatcattttagaacccatgtagttcaagtatgccaaaacctgattttagtaggagttaagtcagggattatgtaccattcatatgattatttttggggatggtttatgagtgttaacagaactctggtaagtcaggtgccaccattttggtcaaagtaaagaaggcacattgattgatactgctttctgtgttccttgttgacccattttttttccttctttcgtattccaactcagtgatgccaaccctacttagcctagcacttcagttttagatgtgtatcatttttgtttgtcctgccagaatggaagatgttagcatcaaccactgttctttattcatcttcggattcccaacaacacctgtcattgggggtctgatattggagatctaacaaggaacctgaaagatgttttagtgttagaagtgttgccttctcagtgccttaatctcccgatctgggaaatgaaaatgagcaccatgcctatacgcctgcgtgattataagatttaaatgagtcagtacttgccatacgtagacactacaaatgtgaactattttagttatcattagtattctttctcgaggttgtaggaaacatgattacaatatcaaaatgaatttggctgtggaaatagttaaatatttatttgggaacagcatgatacatttgatttcctcttatcaagatactttaaagttgttatttttcagaccaaaatatctggacccaatgccacttggtgtccaccgtgatatgtggtgcaaataacccttcaataaaagaagtgtttgtcccagttgaagggagggatgtcaacagcagattttaatctcttcaagaattgctttagctctagatggtcccatgtccgaggtaatatcctttttatggtttttttcacagccagcaaggcagaatataaaaacctgaccatctcagaaaaaattctaaagcatgcttcaagctatggaagtccccatgaagctagctagccaagagtgtcattgggtttctgttgcagtttgacttctccttcccaattctgcatcttcgcttccccttttcacatgtgttgatcccaaggacacttcttataaacatccttcaagctaaaccagctcagtttgtatccaggaaacccagtctgggatactcacatagagttataacttttcatgtagtggatgcttaattaaatggatatcaaattgcgctgaagaacaaaatatgaaacaaacttcattttcagaatgcaaattgtttgcaactcaggtttcttaggctgtgttaggctggggataaaattagtaataataagtgttttgacttagcattacagcttctgaacccagcacagtatcttgtgccataataggctcatggcaaacagtgttgcttgcaagaaaagcagacatttctgtaaatttggccacatttgctggtttacaacctctgttgcctgtttcttttccaaatttactttctggagtctcatacaattgtaggaacttcttcatctctgtcacttcaagacaattaataacttccctttttgtggctctctgtaactgatatttctgatgtggtaataacagtggcacagataagcgactgcaaaaacctttttccacagttattactgttgctatcatgctaagttctccagggaagaacagaattcctttttttattcaactttcattttagagtcagagtatatatgcaggattttttttaacaaaggtaaattgcatgatgctgaggtttggagtatgaacgaattcatcacccaggcagtgtgcacagtacagaattttttaaccaggattttcgtaagctgtatcatgagaactcaaactcatgatggccatttttttttttttttttttttttttgagacggagtctcgctctgtcgcccaggctggagtacactggcactggcaacatctcggcccactgcaagctccgcctcccgggttcacaccattctcctgcctcagcctcctgaggagctgggactacaggcgcccgccaccacgcctggctaattttttgtgtttttaatagagatggggtttcaccatattgaacaggctggtatagaactcctgatctcaggtgattcacccacctcagcctctcaaggtagatgtccatttcttaaatgttttccaggtattttagtccatattctatttcaggtgtgacttctatatgtctctctagcatatagtaaagattccccaaatcttaggctggacagaaaaaaaaaatctgaggaattgtccacaatactgaacattcaaaatcatctctttctttagacccaaacagttgatttcttggaatgaattctttccccagaaatatctcatcccctgggcaaatagacctctggtggcctgtaatcctaccaagcaaacaaagtttagacagattagaaacactgtaatggactaaatttaggctccatctggggtttctactatagttaaaaaatcaattattgcgtagtacctatttactctctttttttccaaagtgaaaatagaagtagataatattcaaccagtcagcacaaaatttgtgtcctcttaaaaaatttagagtaaataaagtattcataagcctcatatactcatttctaagggtttgtttgtttttgtattttgctttgcttgcttattctccttaccatttcttaccacttgtttatgctttaagagcatgtataaatttattttacttacagcggacaaacttcttattgaatagttgaaaaaaaaagcaaaaacaattaattgctggtatttcattgtgaagatattaaatagttattataattctatggaattaagtattatggtaataggctcaaagtagcatttaaaatttgcttctgagtaaatatttatataatgattgtgcattttaatgtcaaaaggacaaatggtttgcattataaaaatttgtggcgacatcagaatatggttaatagctttttctcactcttaggttttctctaattccaatattttcattgcatccatcttcttaagtgaatatgacatgttattccttacttgtgtatattacaaaattttttattaccaatactgatgaaactaacctgtgaagcatgtggaccagttaccattttaactagtttaattaattttaaattcttttttgtgtgttgtctttgttttggttttttggaactctgaaggtcaactttgtagactatgtgttatttttaaaaattaattgttttaatttttgccatttatttacatatatattataatattattttctacatatatgcatatgcccctttatatcatttctaatgcgctatcattttttccctctcattttttcattttttttgtcatgagtatatttaagaaaccagttttatttttatttactccttttctgtcattttgcgttttgttatggtaaattcatcttttatccatcttaattcccctcctaaatttttcttggtttatattgttgttctttttctacttacttatatgtatatacatacatatatacattcatatatggtatttttaataataaaacttttactattttgaacattactatgagtacatacctgttcctataggtttaggattaagctattctttttttttttcaactctacatctttatataatttggtatgtgttatgatttccgtgtaagtttggaaggtgatccttggaaacaccaattatttactccataccaacatccaaaagatcacttgacattttcattggtttgacttcagaattagaaactctactttttataaaataaacattataaactataaattgtgcctacccagtcaacagtcattgccgaagcttttcatgactttgtgattgaataatctgaattagaaattttttcaataatgttacatattaggaacctaggcgtaagtacaaatttgttggtgaatattggttgtcaccacacagtacagtatttcagatattcaaacagatgggttatttttaaaaatgtgtttgaactcatttacttcagtttgtaaatcttactgctaacgtactcctgtggtctaacagatcagcgtaaaatgttaaggttgtaactgtgatttagtacatgaagatatactccttacatactcaaatactagctcatgataattagaacaaaatttaaaggcatggtttataaccatagactcgataatatctatcaagatgtattgccagagtaattacccaagtgttaacacacaggcatatgaaatcaatatatacagtgatttaaaacacatgtaaattgattccaaaagatgtgataccgatgtctattttaaattgctagaaaagaaatgaattaaaagtttgacataacatactttttgccaaaattaattcaagtctctctgttaaattagattttgaaaatttgtctcaaagagaactatgagtataggaaaactgacaaaatctgaacagtgtgctgcttaaaactagcctttaactgttttagattcttttctctcagtcctgcagaaaagtccaggatactgtttctgcctcataaatttttaaatacttccttagaatgaagttttcttatatgtagaaacgaagttggcttaagaccctaagttgggaatattttctttagctttgagatccataggaaagaatgtatctcacaaacacccttaaggaaaatgaaacttaaaaatattagctacaagagagaaatataaacatgctatttctttttgtaacatctcttaattttcagacaacctttcttatctgttaagtattggtatatttttgatagtgctgtgtaaattcagaaaggtgattaaaaccaagaagcttaccctagaacttaaagtataataataataataaaaccaagaagccacatgaagtcatataaattgtctccaaaacacttaaagaatgattaagtgattatcctgtgaaatcattcagataatttgtatgtgtctgtgtgattatgcccactgggcacctttaaagatgctttaaaaataaccttattatctcttgtgatccaacaacttattatccagtaaataacaaacagaaaactacattgactattcctttactaaaataatgacagttttaatgtattaataggagactttttaggtgtagggtaatgatagggaacatgaacagctctgagagcagacctgcttacctattttcttctcaatctaacttcttaatttgtttgaattataatgaactctaaggaggaaaaacagcttcttagtaatatgtaaaaactaaagctcatctcaacacaaaatggagatcactggggaactggtgttcaaggttagcagttaggagaaggctcagggacaccccacttgagatttgggattagactaagtgtctcatcacttagtagctgttatttacacttcctaaaccttactttccccatttgtaaaatcagtaataatcgagcctaactcgtagatttgatgtgtgaagtgaaagaggaaacatgtaaatacaatgctggcataatccatgttcggtaattagtagctcttgtcaccattattatgacacttacacatccctaaatattatgggactaaaaatccatcaggatgaataaaagataaaaacagtacactcttcttaaggtacctcattttgctagcaatatttttatagtcaataaactgttctctctctaggtaaagaaattctggcttaagcattttttatttgcactgtattaactactatctttacgcatagcaataaaataattggaggaaaaaaagcctgtgtctttatatattagaaatgctacatagtactgaaatgatgcactttaagatctaaacatggaatcagggagtcatatttattcattaaactttccagtagctttccctttgattaacagtgtgtattgaatataatcttgaggaaaaactgtggaattcctattggaataaatgagcaaatagattatatttgactttctttttttcccccaatagcgtaattttaatttacattggtaatattgcccattcatctgactcagttatcaagttgcaaaaattcttccagataacactaatataaatgggtaattgacagtttagagcaagtgacagagatatgtctgtgtgtgtgtgtgtgtgtgtgtgtgtgtgtgtgcatgagagagggggagagagaggagagagagagagagtgagagagagagatagtgagagagagagaatcttttcaatcacaaagacgattacttctcctaaagaaaaaacagaggtgtgacatggctctccagaagtcaaactgatctgaaagacaggaagagtcgaaattcttccatcatggagtacaaccatgaaattgttgctactcatagaaagtcttagtatagtttggtttaaacattttaaaattgcaaataaatatagatagataatatcatgatgagaaggtcacgggaagcctggagatttcagggtgctctttcataattggagcgagaatcatgtaacagttaagaaactaaactcttgagccttcatagtctttgctttctccccatttatttatctgatattatataccctctttaattatagactggactgaaatattttatttttgttttattataaaaaatcctactcgtctttaacatgttctcttaaagagtgtttcatatataaatactttccccccaaaatataaagaggctaaccactatagtattgaaagattgaaagaaagacctagggtgtctaaaaccaaatttaaaggctcagttctaagaggagttaaaatgcttcctttgtaagcactttaaacttcatctttaaacattgatgagaatattataaagaattcacaacagcagttacatggaggtagaaaagagtgttgagaagaaggagggtgattgcaacaaatacaaagaaactattgagatgtaacaaagacgtgcaattacctatgaatgggtaaaccagttatatattttgctttcacagcatgagattatttttaatttgaattggtttaccatgtaatgacacttccattttaaagattttatgcatgtaaccttaatactctcaaggtttccagacttcagagaggtaactcatactttcattgtacagtgtcggagcacttatattccacaaggataagtgcttcctgctgggacaaagtcctcatgcacccgacaaatccttcctgatcgttacttgtcatccttcatctaatctgtgctcataacttttccccatcacgactgcttttgggcccttctccatgcaattgccattcttacatatttaacaaaagcatttttaaagttgtcatttaagaaagactttcctaagggctgaggataataaaatgaaattacgctattgactagctaaaacgggatatcatctacctgtgctcctaaaagcttcaggcctctctctttccctgtgagtcctttaacagctatttcttcaaattctgaccttctctatgggatatccctcacgttaactttccctaccccttatggagactccaatacctgtctcctttaggcctagccagtggcaagagaggagcatgatatgatgatgtctccgaagaatttcctgctcccaatgaaaatgacttctatatgattgaacataatgctttgtccttaatcaacagccatctgctccagagatcactaatgcccagtaactctgggtgaattgattatatataatgaacaaaaagaatgtgccaaagtgggccctaagtctcttcaaaaaaaaaaaaaaaaaaaaacccaaaaaacaaactagcttccacacttaaaaccaaagggcaaagaaaaaaaacaagatataaaacagcagtttgctcccactttcacttgattaaagttcgaaatactgggacccacttgctatgtgtgtgtgcatatgtatgtgtgcttgttgtatgacattatttcattgcacatatgaattcctaaacctagtttcacatttatctgttggggtcactttgaatattgtctactttgtgataaagcaaatgatattttattttgtgaatatgcattaaatatgtgttaatttgtgttaaagattattaccaaatatgtctatactctcaaggaaaaataaaaagaaacatgtagctatttgctacagaggcagaaatatgttgcctcaagtattttatttacctgtgtaaacctatgtgaagtgttttgaatgcttttgttttgtcagccatggattcaggtgtttgtggaagcagacttgcattaaaattcacacaggatttttttttttttttattcattgtacttctacattgacccattgagtcatgtagaaatacatgttattttgcatacatttccatatggaaaaacgaagaaaaagaagagttttctctttcagaacattttattattcactgcatttttgcttttccattcttcattgtatttcttactattgcttactaatacaaatacctccatgtgaatttctattagactgtttttggacattctagtgcttttttcgaaggactatccacgatcatcagtttccaatagctacttaaagtatggcattcatagctgaatttaatatcccagatatttccttgactgcatatctctgtcttgtttaatatgaaatagacatttttcttttaaagcaacaagtttatattaactctttattaatctatcatgtcacatgtttgactcattttgtgactacctcttatataatttatatatgccatcttctttgcatttctttattttttgattcagtgtacagtatttgagatataagagaagtatgtataaaggcagggagaggactagatccaagccaggaaaaaagctttctgcaatgtcatttgatccagaagagaattttaaaaccacatttttaaggtaaataagtcagagacttggggacattgagagagggtattggaagaaaatagtgcagcagagatagagcatttcagaacttcagataatgcaactttg[450 bp omitted]acctccaccctcaacgaagtgcaaaatattaatagtgtccagacagagaaattctggtctagaagttaaagggctgtaatgttggagcaattatttgataatatgttagctccgatatggaaatgtctaaccctgtggatttactatcattataattaatgatgtgaaatataatttcacatgtcagccattcacatgtctgaactaatctgataataaggtgaggattgcgtttgtacatgcttgacatgtatttgtgagtggccattatagctatacttatcacagtgtatttactccactgctgttaaatttaattggatttattatgcataatgccaattgaaaaaggtagtattttgatgtgtttcagcttaccacatcactaaaaaacagtaaaatgattataccatatgtgaaaatagtcacaataatcaaattatattaattttagcattcaataatatgcaaacatattatgttttaaatgcacaagcatatctgtgtatgggttctgtgtattttttagtctaaatcttccagattctggtagatattttttagaaaaactattttatctatttatccaaagtctgtggatatatgtttaattttctttccatatatttaaaatgttgtcttaagcagacaattttagaaatcaaaacattatcagaaacaagttttcaagacatatgggaacattaataatacttaatgctaattaaaattgtctattatgatggaatataaatctatcacaccctattaagcaggagtaaaaaatgacaaaattggaatactgcagtgtttccttttaatatggtgtggtggggatgtgagtagcatagacacacacagacatttacccacacatatagttttatttgaagagcccatttttaacctatttgttggcttattttaattgagcttagagcaggtacagtggaagaagtggaagatttaaaagagaaaagtcttggttgatggtgaatgtccttgaatgcagggcaagtcatccagggcccaggtaaagagattattattctaggataataggcatgcaactaaaaatgctaagaagaaaggaagaagccaaggaaaggtgggcctaaaatgaagattgtatgtgaggaagattttcagatgccatctttttttcctctctctttaaggtataagtttgctgagaggaaaaggagtaaggattgtataaggtgtgaaaatatgtgacgtttcagagtagcaatttatagcagtgaaaacagctgtaggtattaagtgatagtctgaagagttcagctaaatagcatcaatccacatcatctgcagataatttgatatttccgttctaaaagagttaaagacctgtgttcaatattttctttcaaagtgttcttgaatatagtctaagtgtcatttaaagttattgctggggcttggcttaattacaacgtggctgctataaacaatcacagttgtagatgctgaacacatattttctgtcatcaggtggtatgctttagtttgttcctgttttaatgataatcacataatttagatttagatgcattttatactatcagtcttgatgaacattcatgatacctttcttatctaggtttaagttgatagaacttaccacataaaaagtatgaagcccctttgattgataacctgattggaaatatttaattaatctgttcagagatgagttaaacagaagatactaattatgttggaatcatacagcctattctttttgaatcttttcttatgaagtaagtactatgacaaaataatagaaatcaagtcgtttgaatgttttgaaattgattgaatattttaaaatataaacttattttaacacatagatatgtcttaacagtatgcctacttaccatcctttataggggcttttactgttattttacttagttatattaatctattaaatattcatcataggttttaaaaattatgtattcacttacagtgttgtgattttcaatcaccataacatcacaggaatattaccagtatttcaatgcaataattgttgtcatcactttgtgttttttatgttggaaagcagccgtaatggagagggtagcatagaattgactttaaaatatgtagattgtctagacacctttaaccaagatacaccatctctcctcacttaaatgataaagggaggtatcactcctatatttccttaatatttagaagtggtataatgtaaagttttaatattaatttgaaaggagaggagctttaagtgagtaaaatatcttgaaaaagagagggtttgtttctggttttaaatattggcatatacgtaagtataaacaaagttgaaggatagtgggatatatttaaaattacttccatctgcaaaatgctgatttacagaaatatctcaaagtattttgtagtcgtttttattttgcttttttttcgcctaagtatacagaaatcatcatccccatccataaagttagaagcatagtatttcaattccaatcacagtaatacaatcatgaaagtgatatttgactggtaaatcataacttatacgtattttcacaaatcccagtgagttacacattcagcaaatgttgggcatctattcagagccatgtgttaggcactcagggaacaggaagcttgccctttaggacttgccctcataaggagctaacgctaccgatatcttgatctcagacttgtagtctcaagaactttgagataaatttttgttgtttaagccgcctagtttgtggtactttgtaatggcagtcctagcaaacgaatgcaccaactagtaggtcagtttttttgaaagacaaaatgtattgtttgtttttaatttttatagtgataaagaggtcaattatgcctcatatctgtgattgaaaataatcatacaatgtaaacattttcagaaaaaaattcctaagtttatcagcatttaaaaacattgtgtcatatgcagagaaaggtgatcataactcatatgcagatgaagtaattgaaatacttgattttggttctcaaaatataaagcatttacattccaagtatctttgcagtgttagtgttatgttgtatcataatgcaattcatgctggataaaagttcttctaaaagagaaaatgaacattaacacaaaacaaaaaatctgagtagttttctgctagtacaaagtccatcttaccttactttttaaatttgcacctaatgctggcaaaaccagttctgtagcataggtaaatagccttaaaatatctttgaatcagtcctaaattttaccctggtccctcaagtcatagcactgtttatctttacattcttttttttttttttttttttttttttttgagccggagtctcactctgtcacccaggctggagtgcagaggtgacctgggctcactgcaacctctgcctcctgggttcaagtgattctcttgcctctcagcctcctgagtagctgggtctacaggcatgcgccagcacgcctggctaatttttgtatttttagtagagatggagtttcaccatgttggccaggctggtcttgagctcctggcctcaagtgatccacccgcctcagcctcccaaagtgctgggattacaggcatgagccaccgtgcctggacacgttacattcttaatgccaaatgaaatgtataatggggaagattaaaaatgaatatagaaagtgtcaaaaaaaaataaattttctagttgttaaaatccttaccttagtatgtgtgtagaactttcgaaagaaaagaaggaaaaataaagcaaaacaaaacaaaaatcaaaatcattcaataacttgaatatttaatacactaatatcagtggtttctttggtatttattactggtttacgttacaattattttatacttgattttttttctctatgtgtattaagagcttattgtttattagtcatattactaagctctgggataaaatgttaaaaaatttgtataaagtttcttacatcaattatatttctgttctggccatgggcatgtgatatttgcacacataatgatttcttgataacagccaaggagaaagcaaagttaatttgtttggatttggacatccaggaagtggcttgttgtcttagacctgagggatactgggtgattcttgccaaagaattagggggatacagatcttaagtagaaggagcagagtgtgtgaaggccctgagttgtgagattttagtgcatgttggaaacaaaattaggtcagtgtggctacagcattgaatgtggaggctttgaggctggagatattggtgggggcaaggttcatgccagccactgagggcgtgctaagaattgtgacttcaatccaagtacaaaaccctctaactttagagtataataaaaggagactcagtctagctatcttaaagaacaatgttaatcttcattctggcattcataaaaagggctggcctagaacttctatggaatgtgctgggcagaaggcttctttaaatatcttggctccaaaatttctcaatcacataactcattaagaattgtactatatcgtattattgatgtcttgctgaggtcccactattatggtttctgtcatttattgtcttttctccactgaaagcattgtcttccacctgcaggtggtcaccagctaggttagtcattctaggaattgctgtgggaagaagtgttctcttgcccctcagggttcatcactctgagatgtgtcattttttaaaatcaatttggctttttcagtagaaattcatgtggacagtttctggtaataaaatcctgaatcatgctacagaaaactgagaaacattaatctcaaggcctcaggaaatgggttttagcttattataactgtttacatatgggactgctactatatttttcagtgtgtaaacctagatgtcaaatgagttaagaacttgatcaacgggcaacatgattactctgtgctcatttcttttctagggttaaaagtctcacttccaagggtgggcgcagtggctcacacctgtaatcccagcactttggaagcctgaggcaggtggatcacctgaggtcaggagttcaagagcagcctgaccaacatggtgaaaccccgtctctactaaaaatacaaaaattagccaggcctgatagtgcaagcctataataccagctattcaggagcctgaggcaggagaatcgcttgaaccggggaggcggaggttgcagtgagccgagatcacaccactgcactccagcctgtgcgacagagtaagactctctctcaaaaaaaacaaaaaacaaaaaacaaaaaaacaaaacaaaacaaaaaaaacttacttccaaataagagaaaattatagaagtcataagccaataatacttcctttcctttaatcccatttaacaagcaattatattaaaaccctaagtcatctgggtcttttttttcccacttgatttacatgagtcttaagctttattgcttgtacttatatctgatctgtggacaacaaaaactacctaatacaacgacaaaaacaaaaacaacaaatactttacataacccacagtctaagcatcataaactgtaagtgatgtggcactgaatgaatactttttattctcctcatttttgaataggtgaatcttctttacgttgtgtttttaatcatgtaagtatctcgtcattaaaaatgacgccttgaaaaattattctataatcaatataccgcagggtttctagagtcccaattcattgaggatggctatttcaagacaaattcaatattcattgtttaaaattcgttgagttctaattatcttcaaggtcatagaagtgcttcgttattttgatgggagtgtgtactatgactactatatttatccttagccatttacaaaacggtttatatgtaagagttttatgtcaataaatttgagcaaattagacaagggagtgttctatttcaattcaaagataattttaattcactaactcttagctagattaatggtcctactaaaaattaagcactccccaatgcatggtatgtgtaccaaatgacctcattaaataggtatatgcagaacagatgcctctatgacctgtctccagatttactgagcagggagtgtccttgttaagtgcccctatgatcagtgaatgaatttcaaattggagacacaaggacgatacttcttcatgggatattctatgtaatttggatatttctctgttcagttctctctgcagtttggtagaatttgaaatgtaaaagagattcatcttttgctgatgaatttatcattttcttacaaatgaatagatacttgattttatggtcagagtttcgtctttgaatacagttttttgttaccatacctttgctttgccagacaatggagattggtgttttaagttaatttttgtatattagcacatttaaaaatgacacctgatttgatttgaattattccatatatagaatgtatgactctaaatgcagttttttataacatatacacacacacacacagatatacacctttaaggcatttaattcaaaccgtaattgttttactgttgcttctgctattgttattggcattatgggacacagctaaaaaatgatgtagctgtggaaacactgcttgatcttttgacatgctactattgatgcctctatgcgcaagaaagttcaatataagtataaagtaaaattgtaaaattaattttccaatgatgtattttaggttgttggcttttttgttgtttcgtcttttactttaaaatccaaaggaaatttagaatgattttggaaccagatttacatttgaaatattataaatatatatacttttaagcctatagcaagctaaaatttgtttacaggtgtttaatgtacccaaagcattattagatgaagtcagttttcttaatgtttctatggaaataactgaattactgtgttattgataggaagtgatcatttgatcttagcaatggagagaactacagcataactgtagcgtgtgttagagatactcattccactgggggtattaccttaatgttaactaaatgttatattgctactggaaatcattaaaaatatatgcgtctgtttaagtaggtttatgcagatatggagtataaatattaagaaaggagctgtatgcataaacacttttttaaattattgctaatatacttaatgtttaaaaatacatatatttattataaaattatatttaaatatagcaaaatgtattacacagtaaatttaaaggcaaaacttaattgattgtaacaatctatctttaaagctggcatgagagagagaatattacttcaattaaaaatgcgttactaaaaagtgctcttttctagaaaaaataaacttcataaacaagtatgaagaggggaattgtgtaccacgtttgtaataaaacatgagaactatgttaatgaatattacaagtataaattttacaatatgctactgacatatatagacaaataatggaatattgatcttaaaacatgggctacctcttttatataggaataatatgaattaccatatgaatgtgcattttccaacatttcactcagttcttctcaatatgtattgaaaactttgggagaatgcacactctgatattatgcaatacattctatagtctttcttgcatcatcctacttttcacagacccctctttaaacactggtaagacctttgtataaatctaacataatcattctacttatattaattacatacaattgttttaaattcctatgaagaaagaaaaaagtagacttgcataaattattctaagaacatgagagaaaaaataaactggcagggccagatctatttctctgttgataaattagaatcagtatatgttttctttgcatatagttatataatcaagggaattatggaatatagcccattgacccttttatgtgggttataatagagatggatgatgtatattggggcagaggaattgggtcaggatacattaaaaaaactgaatttcttgtcttcttgtcttccaaaaagtgctatatttttaaagctcagtttcttgatgaaagaaataactttctgattgaggaacttggttttcatgtatgtaaggtgttcatttaactttttgtgaaagatgtacataaccaaataaagactaattaattatgtactactaaaataatgacttttttttctttttttttttttttttttgagacggagtcttgctctgtcgcctaggctggagtacagtggcgcttggctcactgcaacctctgcctccaggactcaagaggttctcctgcctcatcctctagagttgctgggattataggcacccaccaccgtgcctggctaattttttgtatttttagtacagactgggcttcaccatgttggccaggctgttctggaactcctgacctcaggtgatccgcctgccttggcctccctaagtgctgggattacaggcctgagccaccacacaacagtgtcctgtggtagtcatggtattgcatttttttttttttttttttgagatggaatctagctgtgtagcccaggctggagtgcagtggcgcaatctcggctcactgcaacctccgcctcccaggttcacgcgattcttctgcctcagcctcctgagtagctgggattaccagcatgtgccaccatgcctggctaatttttgtatttttagtagataaggggtttcaccatgttggtcaggctggtctcgaactcttgaccttgtgatctgcccacctcggtctcccaaggtattgcatttgtatgcaatgaccaatgacttatcgttattacgctcctcttttgtattattatctgcgtaacgggtgctacacactttttccaagttgttaatattccagtttgtgaagtcactttatatatatctaaaattttcataccacccattattgcttttttcactgctagttcaaccttgtagctcatactaaaatgtaaaagtactgtcatatttccatggccaaatgctttcctggaatcactctgctaagttgatactttctagtttccaaagggatgcaatttcatgtgactttaaaaactgattttataagataatgtactctagctaatttgcatatgattaaaatccaattgtaattatattcactatggagaatattcagaaactcatggaaactctggagagtttttcatacattgtgtgttatgtccccatgtaaaaattcgactgaagctagttgaattcactaattcttatctaagaagaaatataggtgatttattaatatgtacttaatgctgaagtgtctttcattgtatatatcagttcattttctaggagcagagagaatgtaaattatatatgaataatatttttatttaacctttaaaattgcagaagagaccctttaggttaaaaatgcgttagctatcaacatcatctccttccttaacttgactattttcccagagtagtaattgcaaaccaaaaaggtttaattatctttctgatagcacagaaaatgttttctgtcatagactacccatagtatagtaatacctctttgccacaggtaagttctaatacctggtgatgattccccaactgtgtacccactcaaacacttttcgacctacccttcctttaaaagatgttttgaggaattccagaaataaaatgtatgacacaaattgtgggactaggttaataccatgatgcctgtacttttgaaggcagggaagtgataagtggtaaaatgagacatttcctaggggtagaggtacaaagctaaaaaagaaggaaacccagactgaattttacgtttcttatttccaactcctctcgatgtctacctggaaacctttccaatctttaagcattcaactgcagtgaaatatcctctggggaccttctgtgacatcccaagacagagttcatcacccttttttaatagtgtcctgtacttttcttatctttctattgttgcttttaaaacatattttcttgcaattaccttcacatgcactgtgaacaccggcaatttaatgtgtttttgtgcatgtgtatgcatgcacgctgaataagttccttgcatgctaaaaaatgtttcaacctacaaaataaatagtaatgtcattgcctggttcgtgaaaatttggtgataatagatttcacagaaccaggagaaacttataaagatcaagctccagacatattactatggaggccaaaatatcaaacaataaaacaaaaaatgaacaacccatttataaaagtacacacacctatataacctgatatatgtacatagtgtatatatatatatatatataatctaatatgtaaatatgttatcaatttatggaaaatcatggcacaaatagaagatagaaaaaataaattgttaaatgacaatacaaaaagtctttctctgtcaaaatgccatataattagatggatgcactaatataacaaacagaaactaatgaaggaggagtaatcagcagtgataaaagggtagacagagggcagtggaattgaacagaggaagaggggggtgaaatgaaggcaagaaagtaaggaaaacatgagtatttatttaaagtgagtagttggaggctaaaagggaagttgcaccaagtttgggtctaacatgttgtggtagtaactgtgttcttcatattataggtaaagaagtcattgactacttttaaatagggagattaggtggtcagtgtagagttgctgggtgagcagaatgcataaatgtgcctgattaactaaagatggcaaggattatggatattcaaatagcctttcccacctctgttgatgaattggtagtaacctacatcctgttggtaagtagtcagtctagctaggaatgggctatccaataaatattgtgagaggaaaatggaaagtagttagatattacatttgaagaaaaattaataatttgaaatgcctctagggagcttgtaaaattggtaggatgacagtaacattaaacagaaggaaaagaaggcaaatgggaaataaagttttgagagtacgtttctaaacttagtgaattaaattgagggttattaaagaggaaatttgagccagctgattacaaacacataatcaaagcttctgagcagtcacaaaatgagataaaggtttcagtgttttcacgaaaaactgatatactaattcctatgagtaaatgagatcttcaagaaagagaatgtaaaaattgaagaacttaggacatgttgttcaatcttagggaatagacatttgaaagaaaaggaaggaacatgaggaatgaagggaacaaatgagaaacatgtgcctgctatcaacttagagttggtgaagcaaattggtaaacattggcgaattttatggggttattgatgacccaaactctaagcttctttgtaaattgggaatttttcaaaataaaatgttctgggagatggtaaaacaaatgtggagaaagcaagtccagagtgcagagctcaagctaaaaaaaaagcatttgattttgtgtttgagaagataacacttgatatttaagattttcatgcctttaaagtgaagttgcaggcattgcattgaaaaaggtttatgcagctatagcattgacgtatagagttagaagttaaattgaaaaataaagttagaagtgaaaataatttatgccatccgtcataatattaacttggttttaatatttttttcctctggtttttcaaaaagttgtggaaattgacgaagtataattattctaagatggaataattaaaatggcattttaataagcaaatgtttaaatatctgcggaaaaaagggaaatggaaaaaagattcagtaaatgttagctacataataaagtgtatactgcccaattatttgtcatgtctgcctatctatctatctatctatctatctatctatctatctatctatctatctatatttttttgagacggagtgttgctctgttgcccaggctggagtgcagtggcgcgatctcggctcactgcaagctccgcctcccgggttcacgccattctcctgcctcagcctcccgagtagctgggactacaggcacccgccaccacgcctggctaattttttgtatttttagtagagatgggagttcaccgtgttagccaggatggtctcgatctcctgaccttgcgatcctcccgtttcggcctcccaaagtgctggggttacaggcatgagccacagcacctggcctatttgtaatatttttgagggtagcgaatatgacatgtttaaatggaaatggaattatcagaatccacataacccatgttggcttctttctcagtaatatattgtaaggaaagagtgaccatgtacatactggttgcctctaaaatgtttctcttacatcaaaaattagctaagatctcaaggacaaatctaagatcttcatttaagaaatacttatagaaaacttacaaaatttctaaagttaaaatcaaactattataacatagaggaatggaaggaaaaatgttcagtggcattgtatgacaatgtaaaatatcattaaaaagttttatagaggaccagataaataaattagactttttgctggtagggatattaccatctacaaagggaaatggatctgaaaacgtttcattgaaactttcaaacatggaaattctgcttgtattactaaaagaatacaaattgttgagtgcccattattagtgtaacttgcctaaaatttactgctgccctatttattttagtattctgacttctatttaattttaataaatatatatttacaattttttaaagatttatttataactttctctcgtggtaaaatatacataatatacaatttatcctttaggcattttgaagtgtgtagttcagtggcagtgagtatattcacaatgttgtgtgaccatcccaccgtccatctccagaactgtttcaacttctcaaactgaaacttcatacccattaagcaataactttcaattccctcctacctccagtccctatctccagtgtactttatgtctctctgaatttggctgctctgtgtacttgatgtaagtggaataatgcaatatttgttttttgtgattggattatttcacttagcctaatgacttgagggttcattcatatgcagcatatgtcaaaatttattttctttttaaggctgaattatattccattgtatgcatatatcacattttatttgtccatttatctattgatggacacacttataaatgctattcaccaagacttccttttaaaattccataaaatttttagttctaccactgaaaacactaattgttaagattttctggtaattaagttttatagtttatagtatactattattaatctgtgtctaaaaaagagttgcaaatgtaagatacagatcacaatatttaatcaagtatttttttcagcatgttacttggagatggccatttataaaggcatatatgactctaaagtttaaacttcactgaaaatacattgcatcctgtgttatatctaatgtattatgcctcactcataacacattcagtgcatcctgcaaaatttcagtgagcaattaacctagcatttctctaagaccctgcacatgctatgacatgtacaacagaggagctgtgtctctgattttcactgtacctttaacatacctcagaccgagtaattaagtaattaatatctggaggtatgaagcccactccatacaaccacattgtccagtccagttttagaaacagtcaatcaacaattcccctagcctgtcaagtgcaggcattttaggtcacataacatgacaagaaattctaatatatgctcgtttccagtcctagtaaccagaatatatgttaggcaggtttatcttccatatgttacagaagacgaacctgagactctgattgaggatttaaagtgactagcagagggtcaaaaacttttcttcagagccaggagaaaaattgggaccttctgatttcctcccttagctctttctacaacacagtgctcttggtagttcctaatattatattgtttttattacaagtttgtttgcttaacattcatttgatataattacacatccataattatgtaataaaattgtcactgtgaaaatcacatttaatatccctttagaaaaatttccaagtatgctatatttctgtccgtcatatagtacataaagaattgtaatttaatatcaatttagtcttagaaaattatgatgtataatataatttaaacgattttgatgaatataaaataaattttacatttattttacattaattacatttattttacattaatttacatttatttattagcatttattacatttattacatttattgattaacatttaatttattttacatttacttattaatttacatttattttacattaattacatttattttacataaatttgatttgataaaatgaatgtgtatgacacatgttaagtgtaaagtcaccatgaaggtttactttcaaattcaggatcaggtggaaagggatctcctctgacctaatcttagaccccacgtcaatgtgctggactcttctagatggaccaggaactggatttcattatgggagtcgggtttggcaggtggagaaggtgagaagcactgttttgcttccgcagaatctagagccatccctacaattagatgggtcaagctaacactcgttctttcttgcttcctctatcttttcttcttgtctggtctgattttaataaaatcaaattagatttttgtgacagaatcaatgcagggaaactatgaaggtcatgtctctgttgatggtggtgatggttttatgtgtgtgaaactcttcatcattctataaagacatgcacatgtatgtttattacggcactattcacaatagcaaagacttggaactaacccaaatgcccatcagtgataaagaggataaagaaaatgtggcacatgtacaccatgaaatactatgcagccataaaaaaggatgagttcatgtcctttgcagggacatagatgaagctggaaaccatcattctcagcaaactaacacagggacagaaaaccaaatactgcatgttctcactcataagtgggagttgaacaatgagaatacatggacacagggaggggagcatcacacaccggggcttgttgatgggtgtggagctatgtaagggataacatcaggagaaatacctgatgtagatgacgggttgatggatgcagcaaaccaccatggtatgtgtatacctctgtaaaaaacctgcacattctgaacatgtatcccagaacttaaagtataatttttttaaaaaaggaaaaacaaagaaatacagttcattttcttatattgatattgtcctgcaacaaagctgatttgatttattaatgctgtgcatgataaagatactcttctttttttagtatgtatgtttttaaatttttcttggctttagtgcaacattgaatagaaatggcgaggacagatgtatttgccgtgttcttcatcctaggaggaaagtgttcaatatttcaccattaattatgttgttacctgtagagttttcacagataccttttattaaaatgaggaaatttccttttattcctggtttgcaaagaatttgtgggttttgttgttgttttatcatgttttgttttatttttatcataaatgggtattgaattttatcaagtacatttatttcctgggtatgtcgaaataaacatatagtttttctcctttaagaaaaataaataaaaatcttcatgtttaaaatgatgtagcttaagaatatgattggccgggtgtggtggctcacgcctgtaatcccagcactttgggaggctgaggctggtggatcacctgaggtcaggagttcaagaacagtttggccaacatagtgaaaccccgtctcgactaaaaatacaaaaattagccaggcatggtggcatctgcctgtagtcccagccactcagaaggctgaggtaggagaattgcttgcacccaagaggaggaggttgaagtgaggctagatcatgccactgcactcgagcctgagcgacagagtgagaccccatctcaaaaaaaaaaaaaagaatatgaccataaaaatcagcattttcaaaagttcaataaaagtataatttatattataagggaaatgagctgaaaactttcttctctagtacttttatgggatttgtttaagctgactgtgcatttaatacagcacataatgaaacttggtcccttataatttactaaaaaataaacttaaacaaaaagcatgttcttcagtttctgttgtgatctctttgaatgctttgctaggtaattattttgggcttatacttgcaaaaatttgttagaaaattagagccatttaatttttttaactatgttcttttgtgcacattttgctttgtctagttttcccttttaaagatctttatagttctgtcagttaggtttgaaacatgccattccctcttccgtcctttgttttttctctaatcgtcatttgttttaaaactgggtcagtctatttgatctcacttttcttatttcctaacagttgtagatttcacaataaagaatcttcctgatattcactagtacatataagtcacgaagtttagtttgtagcatactcacaactaactgtatgaagatataaaactgtacagtgttgtaatcggctttttaaaaaaaatgctcagtgaaaataacatttttggcttcagctggtcttttgtcttggagcaaaatgggaagaatccaataagccatttatgtacatagcttctttctcagttttcttctttcattgaaccaggaagggtagtagaattggaggactgtcctttgcagaatgagtacattgacatagagtctgaggtgactgcaaccttggcccaattgttgaggctgatttctttccattatcagagtttggtcataagagaaaaagaggcagtgggtggagtggagaggtcagaaaagtgaggttttgaatcattttctaccacacatatcatctgtgatcttgagcaagttactcagcttctcttgttcttagatttttattaaggaagcttttcctgtttccaagaaaactttatggcaacatcgtttagatgaggtgcccgtcagagattatttattctgtaatttgcaactgacatggtgattatttaatgtaaattatgtgtggctttggaattaacattttacttcatcccagtatcttcacattaaatgatttaagcctaaaagagaaaacattgtgccttctattataacttcattttagtgattattggtaggatagatccttgataaaccttgaaggataattgaaggattattgagaaagaagcatctactggtcattgtacagaaataaaaacaatagacctctgttactccatctgtttcttgatttcagattaatgaggcccacagtgtaacatttcgtaaatgagaatgcccatatgtaacaaattttatgtgctctaaaaaaccaggacctttgctttcatgttagcaatgcaaattttataagtaaaaactaaagagaagtacaaaataaatattatgtttctcctggaagagtaaataaaatagtctaaacaaatagaggcagtaactcaaaattttaagatgaatttgaaatgaactttcattggctccattagaaacagtttcagatgtattttaactgtttttaaaaatagattatttataggtaaacattttatatcacataagtatattcatttattggcacattattttacacatttactcaatactctctcagggaaaaaattgatatgtaacttttactggccaagtctcatctaacatttttaaaataaagtattggtgaggtgtaccagtaaattttggaggttactttatttatagaaccttacaagcaaattttgttttttaggtaatagaaatagtaccaaaataatcttagtgatagtaaaattaaaatcagtaaaattctaatgtatattatactgtggatatagcttacttataagtaaaagatactgtctcacttataaggggagtttatttgattttgttttatgctaacctataacaaaatagaagcattaatattattacctctagcttattctcagccatttttattagggaaaaatatagtgcattcatgtattagagtgctcaggtatatgtgtgctttaatcatgtaaaaattataattgttaaaaagataaattagttcattttattaattatcttgccatcctgctttgtgcagatgtagccaaaggtgaagaagattgtaatattcacaaacacctctttatttattggtgatgttcctttggctgtagaatgaaacaaagctttatataattcagatgtgtaaaaaatgtcatgtcttgcaaatcaaaaccacaatgcaataccattgcatgccagtcaaaatggcaattgttaaaaagtcaagaaacaacagatgctggcgagactgtggagaaatgggaacgcttttacactgttggtgggaatataaagtagttcaaccattgtggaagacagtgtggtgattcctctgggatctagaccagcaataccatttgacccagcaatcccatcactgggtatatacccaaaggaatataaatcattatattataaagatacatgcacatgtatgtttattgcagcactgtttacaataacaaacacatagaaccaacccaaatacccatcaatgatagattagataaagaaaatatgatacatatatgccatggaatactatgcagccataaaacagacggagatcatgtcttttgcagggatatggatgaagctggaagctatcatccttagcaaactaacacagaaacagaaaaccaaacactgcatgttctcactcataagtgggagttgaacagtgagaccatatggaaacagagaggggaagaacacacaccagggcctgttggtgatgggggtaagggaagggagagcatcaggacaaatagctaatacatgcagggcttaaaacctcgctgaagggttgacaggtgcagcaaaacaccatggcacaggtatatctatgtaacaaacctgcatgttctggacatgtatcccggaacttaaagtaaaataaaaaacaaacaaacaaaacgtttcttttgaattcagttgcatatgaacttcttactctgaattcctgtttcatcttagagatgatttttgcttttatctttcttaagagataatttcattcattcaataaacttttaataagacacctctatgagtgagaagctatgacagaatttgtagaaatgtcaaagatgaaaacacatttctgacctcaggaatttatatctagggggaaaataagacttcatgaaaattgtgctaaaaggatttcttataataaaatattttaaaggggtaaacaatgtattacagtaattggtaaggaaatgaatatcatgttttctaaattctgttttagtgaaaattctcttgccccctttttttttagccactgcattcttttcttattcaggccatcactatgacactcttgtgttattgttataacttcttccacttcccctttgtttctgccccctacccagatactctctccttcacattatcactggattgtcttctaaaagactcatctccttaaaaatattgataaattcccatctctatgacattaagactatctagccagcttactctaagagtctgttcaccatctgggcaacactgtgcctgtcacatttttcaaatactcagtgctataactgttacctacatgaaacatctgttttctaactttatccattttctgttccttgtccttaaaacatcctttgcttgctgctcctgcctggaacaatcatgcttttatttaaagatgctactaatgaacaaaataatgcctatagttaacaatagtgtattatgaacttaaaattttgttaagagggtagatctcaagtgttcttatacatgcaaatgagcttcccaaacaaaacaaaaacaaaagggcaaaggaaacttttggaggtgatggatatgttgattgccgtaatagtaatgatggttttatgggtgtatgtatttgctcagtcccatcaaattgtatacattaaacttgtgcagtatttttgtgtaatgattacatcacattaaagctattataaacagataaaatgtccaaaaaacccctaaagacattaacatttcgcctttaccccaattaaagacttcctggtggggcatggtggctcaaacctgtaatcccagcattttgggaggccgaggtaggcaggtcacctgaggtagggagttcaggaccagcctgaccaacatggagaaaccccatctccactaaaaatacaaaattattcaggtgtggtgacacatgtctgtaatcccagctacttgggaagctgaggcaagagaatcgcttgaacctgggatgtggaggttgtagtgagctgagattgggccattgcactccagcctgggcaacaagagcaaaactctgtcaaaaaaaaaaaagacttcctaagttggaattgataagatctcaaaaaaaaaaaaaaaaaaaaaaaaccaacattgattcatacccctaacatttattactctctaaattattgtagaattattcgggtaaatttctgttgtgactatccgtgagctcctggagcttaaagtgttactagaggcagattcatactgtcttcagcaaacctcagttcttgcctcctcagaagaaaatgttcgaccaatgggtataaggcagaaagggagattgaggcaagttttagagcaggaatgaaagtttattaaaacgctttagaacaggaatgaaatgaagtaaattacacttagaagagggccaagcaggcgacttgagagatcaagtgcacggtttgaccttttgacttggagttttatatgatggcttacttccaggatcttgcgttacttcaccctggttcttccattggggtgggctgtccacgtgcacagtggcctgcttgcgcttgggaggggagcatgcacagtgtgtttactagagttgtacgcatgctcacttaggcgttcttcccttaccggctgaatgctcctaggaggtcatttaccagttaaattctgccattttgcttcttaatgcacatgctggagctcactcacccaactcctgagatcttgtcgggaagctactgagtttcaggtgttttctatctattgggagagtgcctttccctgatgccggctgtcaccaagtattattttagagagacagttaacaaccacctgaccatcacctgatggttgcctgacattcctggtgtgtgttgaggtggaaccatctgtcctgcctattcctgactagctacctactgtaacaaaaaagacaatgtattacttattaagaattctcaactgggcatggtggctcacgcctgtaatcccagcactttgggaggctgagacaaacagatcacattaggtccggaattcgagaccagcctggccaacatggtgaaaccccatctctaccaaaactacaaaacgtagccaggcgtggcggtgcgtgcctgtaatctcagttactagggaggctgaagtaggagaattgcttgaacccaggaggtggaggttgcagtgagccgagatcttgccactgcactccagccagggtggcagaatgagactccctctcaaagaaaaagaaaaaaaaagaaaaaaaaattatctcatgcctttatacctatcagagctaaaaaacaaacaaacactttattgattgcaataagtatagaagtgctctacgcattcaataattgctcagtaatttctaatttaaaaaaagttttgggccgggcgcggtggctcacggctgtaatcccagcaccttgggaggcagaggcgggtggatcaggagttcgagaccagcctgaccaacaagatgaaaccccatctctactaaaaatacaaaaattagccgggcgtggtggcaggcgcatgtagtcccaactactcgggaggctgagacaggagaatcgcttgaacccgggaggcagaggttgcagtgagctgagattgtgccagtgcactccagcctgggcgacagagtgagaatcctttaaaaaaaaaaaaaaaaaagaattctctcatgctttgtacctatcagagctcaaaacaaaaaaaaaaaaacaaaacaaaaacaccttattgattgcagtaagtacagaagtgctgtatgcattgaataattgctcagtaatttctaattaaaaaaaaaagttttggtcatcttatgaccattgccataggtggcatttgccttaagtgtcctgtttcgtagactaaattctctaccacgataattaaatttagttttaaaagtagctaggtcaataaaaattaggtttcatttaaataaagtcttctgtaaaagttacactgattattactaccacctatgctatttttaccactgctattacatcattatatcattacttccaatacctaaaatgttttatatttgctatgcatgtagagggtactttggaggtaacctgaggctttgatgccaactgaaggttttactgggctgatttattatgttcatctttatgtcatgtgtttttatgtattagaactgccgttttctcctctccatctttttgttctagctgtagtgcctgccttagattttcacaaattcaccatctctcttaggtatttgaaccttcgtacttctgtttcctctccctgaggagctcttccactctgcgggacacctatgtaactttcagaattgaggtcaaatatccaaacatcctgtactctggaaagcttcctagtttctctttttagaaatctgagttagaggtctactgtttgctccttgagcagcctttgcttctatcaaagcatttgtcagaacagaatatctctgtaaatttgtctctcttgctggcttatgcatttttgaggtaaggaagctctattataatcagtaatagtagtagtaacaacagcaagagtagtaataatggcagtacagtagtagtaacatttatattcccagcttcttaacgtggtacatggaacctggtctgtgcctgatatttggatagatgactgaatgaatgaataaagttgtatctttggtatttggtggtacttattactccattttattattactttgctggtaattattatttccatgtaacaggggagaaaactgaagttcaaattgttggaactagttttttatagatatccaagccgaacttggaatctagacccaagctgaacactataaatcatcttttttttttttttgagacagggtctcactctggttgcccaggctggagtgcagtggtgtgatctcagctcactgcaacctctgcctccccgtgatcctcccttctcagcctcccaagtagctgggactgcagatgcatgtcaccacacccaactaatctttcatatttttagtagagatgagatttcactatgttgcccaggctggtcttgaacttctggcttcaaacaatttgcccaccccggcatcccaaattgctgggattacagatgtgagccaccacccccagcctcatcttttttaaaattctattttttgagataattatggattcacagatagctgtgagaaattatgccaagatgtttttatatactttgcccagtttctcccaatgacagcattttggaaaatggtaatgtaatatcataactaggatattgacattgataaattatacctatcttatttaaatttaccccaactttacttgtattcgtttgtgtatatgttggggagagtggatggtgtcttaggccattaggcctgccataacaaaaacaccataaattgggtggcttaaacaacagaaatttatttcttacagttctggaggctgggaagacctagatcaaaaagcagccaatttgatgtctgttgagggctcacttcctggtttgtagaaggccgttgttttgctgtgtccttacatggcagaggggccaggaggctctctggactctcttttcaaaaaagagtgctcatctcattcatgagggttctgccttcatgacctaataacctccaaaggcccctcctcctaacacccttaccttagggtttaggatttcaacatgtggattttgaggggacacaaacattcataccataactggtgataagttctaaacagttttatcatctgtttagattcctgttaaccaccgttgtcaagatactgaatagttacaatgtcacaagtgtttttcatgttgttcttttataaccacactcatttgtctccttcctaacccttgcttcagtttctaactcctgacaattacttatctgcctactatttaaaaaattttgtcatttcaaaaatgttatataagtagagtcaaacagcaagtatgatttttaagtatgtatgatgtttaagtttcttccaatttgagattgctgtaaacaataatgtaataaaacattagaaattcactttcatttttgcatgtcatatatatggattaagaaagtgttgtatttggacacttcctcttcatgccatggaggtagggaatgttattttttcccctcaagtcttttgtttcccaattgtcttgtaaggcactgataatgtaattagcattcaataaatatttgtttatatggatgaatataggagttaaaattatagagctttatacttagggcttatagtaaaaatagtacctttttgtacttgaaagtcttgctcatgttaaataaatataaatacaatgcttgaatgttgggcttcaatagtcactgtgctggtgtgattttacaggaactagagaaaccgatgcacccttccttctatcgccgcttctgctccacagttatcatcttcagtcaatgggtcaacttcttccattaacacaggattatgaaaacctgaaattgaatctctttattcaaaatatacttgattaagttaaagcctgtacaaaaatcttgcaaagttattgttgttaatgttgttattgtaattaaccattatttgtgtctagttggggtttttttttttaattataaagaatggagagtttcttaatttaacttccttcaaaaagggagtttcttgaaaggatgcatgcactcaggaacctgggtaaagagcttagtgcatggcaacttgccagagtgggcactctcttccctctacccctccctgccctttctgtcatggaactttgccctctgcacatctgctccgattatctctccactggctgggttcctcagcttacactggcctcttatatttcagttccagccatgttgctgtctcatgctcgttttgcttgacttctcacttgtccagctgggctcatgagccaaaggctgctgttcaatctctggatgggcttctttctcttcaaattttcaccaccattctagctgtcgtggttggagacatggggccctaggatgcagaacactatgcgccctttctgctagggtgtgagtgattacagctttttaaaggcatgtgaagacatctttaaagactcttccaacaatgagtaaagattagtttccagttgtttattgctattttcttgaaagttaatatcacctcactgctttcaatctgggagcaaatattattcagcatattatctgcctactatttaaaaaattttgttatttcaaaaatgttacataagtagagtcaaacagcaagtatgatttttaagtgtgtatgatttttaagtttcttattgtatattagagaaaatcataggaggaaataaatttattaagcactgcagaaactatgtaagtctttcagatttaacttaatgtgctcagatttatttaaaggaaagtattaagggattctaatatttcacttgcagtataaccttgttataggaatacattgaaggctttcccatgtgactcaagtgtaatatgggacacattctttacatgagatagaatgttctttgtaatcaatccacacatttcctgtaaaagagataaaaagtgagggaaatcaggaaggtgatgtgtcacctaatatcactgatgctgagatagcaatggatgctttgcatgaccatgaaatataaaagacaatcttgaaacagaagacgactttggtgacacagaggaaaaaccaaagaaggacaatttaaatgaagggcattttatccttggattcaacagctcgttttgcagacatgagagtctattcataaccctttacacattttacgtttacatttgtatttacatgaaagggactatatgattggcagaatcacatgcatacagaagacatctgttcaaaatatatgctatagcatacatggtcagagaaagtttatctctgacaccattttatttgtgtaaaatgaggcctaacatacatagagagttgactttagggtacttcagagattagaaccatcaagagaaatgaaatatttttcagtgtagcaaaatgtaacatcaccacaaacggtaattagactttttgaagtatttttaaaaaagaatggttttggggtactgaaatgtgcgtcctaaatgaaatggacagttaatttaactagaacgtgtgtggcaggccaaacttgtatttgtgtgaaaactgcaaagattatggtttaagagatttcagtttaaatgcaagggtgtgtgtgtgtgtgtgattttcttcctattcttaatcttcacaattttattcagtgtacttattatgtcttgctaggattttttcaaattgaatttcatctttttttttttacaaatacagaaataactctatccttttgatagggatattgatcgttttgtagacatatctaacattgtaacctgtcttcccagaaaggtgacaagaatgacatgaaagtttatgttaagattatgtgtgtgtgtgcgtgtgtgtgtgtgtgtgttgtgtgttgtatattttcccttaagtcctttcatggtaatcactagcattagaaaagaaatgtcagtttgtaaaaacagtcaaagataatctccacattctgcctaggatttatgttatgttgtctattttctgtttgcccctttggatttcgtctgttgtcttctgtactatgcacttgcttcacgaaactgacttgtacttttgccaattgagattggccaatggtgagccaagtcatgagaccgaggagaagaaaaaggtctgagtatttttctcctagctccctgtttgaggttgtgtcctcatctactgtcgctgctcccctcttcagagcacagtccacacagctctttatcctcctgggttctgataacctgttctcctattggtcctttggactaaggggtcgcaacagcttttctagtgctatctctggtccctgacctctcccttgtggttcttctgtagcttgcccaaaactctgtaattagtccctttgtaaataaggtgttatcttaatttgagtgtgccatctgtttcttgttgggaccactgggagatatagcactctgggtcacagacaggaatgggcatgcaaggagagaggaaatggtggcttattgcataaggtactaaggatgcgtctcatttagatcctggtcttgcaattcagaccagtcttctgtttggctctttctttggcccctggaaggctgaaataatgaaggtctgcttaacataatctctggcaaatctggtactgggtatgatcaattgctgtgtgatcacacagggaatcgatataagagtcatattcatatgtcaggagtaagtcatgtcattgcctttatccatactatctgaatatcaccattcaaatacacataagctctgtaaattcaccttgaaataaatattttctcatgtgttttatatattggaatcttacagaatggtgtagaactgtaattgcatatggctagtatatgatgctatattaaataatgataaaatgctttaaatttgtgtatacaattaatagctttcaaacagttaaatataaactgcattaataatcaatccaaatgtaaagaaaatatgctaaatctagatcactttagggcgagcatcatatcctttttaagccaagcatttgttaataaaaattgaaataatgcaaagccagatattaggttatgccataattgtaattcatatattaatagaattgtttaatatactactattcttaacatcaaattaaacatcttcaataactgtatttaaattatatgtaattgtgtatatggccgtaggtttttaagaaaatatgctgggttgggattcattacatctagtgagaatgaattaaaaacatgatgccaattttgtttcctcaaattttcacataaaggaaaagttcaaaccacatataacaacctccatgatctataatgttgcatgcagacaaatttcatatagacgtgcattccagattttgtgtttatgatttctttcttcaggataaaatatagggggttgttgactttgacattcagggcttggcaaacttagttgagcctttccagtcttaagaagagacattcttggggctaggagcggtggctcacgcctgtaatcccagcactttgggaggccgaggcaggcggatcacgaggtcaggagatcgagaccgtgtctctactaaaaatacaaaaaaaaattagccgggcgtggtggcgggcgcctgtagtcccagctactcgggaggctgaggcaggagaatggcttgaactcgggaggcggagcttgcagtgagctagattgcgccactgcactccagcctgggcgacagagcgaaactctgtctcaaaaaaaaaaaagaagagacatccacattcttaggtactgtttttcaggcttcagggatcataggtttacaattttggtatttagctaaattatgtcaatcattttttttagttgttttttgtttgttctgtttttgtttttagcaaatctggccatacttccactgaatacaaggattacttcggagaagttatactttgtaagaaaatagattctgtgtttgaaaatatgattaaaaaattaccccaatagaaatatttgggaacagttattgctagtaaataaaactgcctttaaaattatttttattattgaaaaatttcatcgaaaagaattttgctgttctcaaagttatgatgcaatttaaagtataagtgattattttggcccaaaacctatgagaattttctctccctaatatgtctataccatctgctggctattagtggcaatcaaacccacaatacaaaaaatcaaattttaaaaaaccacacttttttcctgttagttccctgagctctgtcactacaaatattgatgtggcaaggctgaatatttctctgaacatctatttcaaattgaaactaaatgcctgtgccagaatgactttatctgggatttgagcctgtgtgtgcctgacatctaaagcaactgctctctgctttctcttctgttttctctatgtttatatggttcagtgattgtgccacctgcccctccttcattgcatcctgcactgagatctaccatgactctttaccaagtgcatttaaggtgtctggccacgtgtttctgaaaatcagctaccgatgtatgaatggtaaaaaacatgataatattatttcttctgagtttatacgtatatggcttgtgtgcatggaacagcaattcctggtttaaaaatggccactctatttacttattttatccaagagaccatatcgtaaaagcagggaatacaaactcaaaagccaacgaacaccaacacagtcacccagccacaccaacaacaaataggtagggatgcaaggactgggggtgggaaatggaaaccacaactaccctgcaacgactttctactcaaagcatggacctaggacctgtagcatcggcagcaactggacattgatggaaatgcagaatctcaggccccaccccagaatcactgaatcagaatcagcctttcacaatcttcctagtaatgtgtgtgcacattcaaggttaagaagcactgcttttctcttatctattgttgtcagatatgctgactttttaaaatattaaaaatatgcaggtttttaatggagaaggtcttaattttaaaaacattgtctaattcagcttttttttaaatactttctgggaacactaaaacatactgaaaatgtcaataggcctaggggcccattagttttaaaaatctgcatgtcaaagagtgaatatgaatatggacagttttattcttgttattttctgggaatagtgacatctaaacaaaactcttgatgataaaaaagcaagcattgccatcagtagatatatcttacttccttttcaagaaatatcccttgcctattttagctataatgctgcctgccttcaccactctgcccccagtgtgtatatctatacagcagctagagtgtctcatttaaaacttaagttgaaacgattcgtttctccagtggcttctctctttcctactcaggaataaaagccagtaccttacaagctatttgagagcacctcacttagttgttcttttggaaatgtatgtccagccacccctgcaagcttgcaattgcttcaaccctctagacaaactctgcctcagtattctcgcctcagatatgtgccaggcttgctgtcttacctatcccaatctgtttctcaaatgtcattttaagaatctgagcttccctgatgaaaaccataaatcaatagaccacaaccccacccctaaattctcctcattaatgcttttcttcagagcattcactaccattggatgtctgtaagttatttcactgatttatttgtttacttgaagtcttttgccaccagaatgttagttatttgaaagaagagacctctggtctcttgttcatgttgtttccccaatctgagttcgatgcttggcacatacataattggttctcaatactgtgtgttgcatgaatgaatgatatccaagcttaaaaactacatgacactgctcactgaggtttttgtttgtttttattagtagtacataattgaaggtgattttattatgtaattatatagttctgctgtagcttattattacagtctttttttattttatgcattagatacacaacctacttctgggttatttatttttctgccatcttggaaatttttcatccctattgctcacgtccaaatgtgcctgtagcaaatctttttttcaatttttttaattgacacacaaaaattgtcgatgttcattaaagtacatagtgattttttaatacatatgtattagtatgttttcacgatgctgataagacaaacccaagactgggcaattcacaaaaaaggtttaattggacttacagttccatgtggctgggaaggcctcagaatcatggcagaaggcaaggaggagcaaggcctgtcttacatggataaggattacatggatcctttactgaggataacaaatatgattccaggttctactcagttattaatctaagaaagagatttgaaactgtacaatactttcaagtatactaattagcctcataattacctgaaaccaaaatagagcaatcatatatcttaaaatatagaatgtaatttattcctgtaattaagtttcaatattagaaaatagtttttttaaaaaatactcttcctttgactttttttaaataaaatgctgtgaaaatgttcacagcgacatcttgaaagctaatattcatttttgtactctacattaagtaggggctcggttttagatacctctgtttttagtacttaaaagagggcctgacaaagttggtgcttaataaatatttgaaaataaacaaatgaatgaatcaatgagtgaatttctgttagaaatatttatttgtgtatggaatggatagaccttgtacaaagttctccgtgatacatgaagaaattgcctgtgatcacaagggtctgtttattgaaatgaaataggtgaatggttggaactcttgactaagagttacttaaaatatactctcctcagctttgttaaacagttttatgtggtagatacaaaacttcaaagggaggaaaactctgaaatatcattaatctactctaatgatttatgaatttaagtagacttcttataatattttcatttgggtggagtataaatttaaatattaaaaataattatgcatatttattttatctttatataatacaaattctatggctagtttagaagaatttactgaatgaataatattattaattttatctgtcagttatacacatgaatatttattagcatgaataattatttttattttaaacaatggtgactcatagaaactacctgctttgatactagtagaagccacacaagtgagttacatttttctgaatactaatattatgtcaactgaatatcaaattgttgacaaaatatttctaagtggaaaacaaaatatgaagacaaaggagtgaaatacgctagaaaaatctaggacaagaacttgagtgtcttgattcctagctcagacatatatataaatgtgatacataattacataccgtagacgtgtttcaaagatgttgaaatgctacatagctcaattagtatataatataaaataataatgtatttatatctcttttataaatatttttctgtgaatgtcatttgttaagcaaaattttattaataattatacaaaatattagaacaaagctaacaatgtaagttttcaaatgttctacagaatttttgcaacaatgagtggaatatcagtaacctgacattgcctgagtctttttaaattttctcatgagctttcataaactttcgtcaaaccccaaagagatcagtaaatatagggatcagaggaagatcaagaagacaatttgttatgtcccggtaaattatttaataagaataataaattgggtcaaggtttgaataaggtgatgcttaagaacaggcaaaggatgtgaatgacaggaaggcagacagagagtctgccaactgtctcctgtgtggagacgtcttttgtctcttcacccttttctgcctcctggaaatagactacctcttcttcagggaactgtccctttatcttgtctcattagggatcccagttacagatgctattggacattgtcattaatccaagagcgagcatgtgcaattcactgccatcctcaaacctctcgtcttctaacatttatgtctgtgaacagcgagtccattcatccgttgtccaaattgacatcttggcattatccttgacatcacctactcaaaaaatgtattaacaaatcaggcagatttgacctgttaaagaaaattgtctttggttaccattcactatttttccatctttaaaacttgcatcacagggtaagccaccatgctgtagtaaccttgtaactgtccacatccattctagaattgcaggtgtgattataccagattttttctgcttaaaaaaatagtgacttctcattagtcttggggtgaagtcataagcatcttaatgtaacagtaattcccttgatgttctttgtctgcagtgcctcatttctgcctccaaacccagcagcatctttctctttgttactgacattggagtctaggctctaaattactgcccttttttccagtcctttagttttttcatttgtgcttctttgcctagaatgctcacactttccttcttttgtttacattttatctaaagtgtaattttctcaaggaaacattttcctcaagtaaatttctctgagtgggtcaaatgcctcttttctaagaattctcgtcaaattggtaattgcaaatttatatttattttgtttccagggatatgttcatgtccatgagaggagatccagtgtctcattttgacacaaattgtgtacttaatcttgattatatatttgatacactcgatgctagggaactgcagttgaataccaggctgtacatgctgaatattgaaaaaaatcagaacttgaaaattaaaatttgttgatgaatgaaaacaaaattcaaatgtttgtcagtcttatatacacaaatatccattggaaatgaaagagaaatcaaattgtttgaaagacatgcaaacaacatagaaaatacattatcaactggatagttcaagaaggaaatgtaccaggaaaaagatggaaatagtatgccctaaaacatccttcaaaaaaggtgatataaggacagttaatctttgagcatttttggttacctaaaagctaaacaatatactcagacattgagtataataatagtttatctagaagataaactatttatctagtttaaactatgatttatcttctagataaactgttatttagaattgcatgtgtaattcaataaattgaaattttactggagtaaagcatttaatgtgattttatgaatttcagttatgtcaacatttctaaatacgttctcagaataaatgtatgtagtgttttgaactgtaaaaatcatgtatatttacagggataactttctgcaaggattttagacatgacattataggaaggcttacataacgatgtaagtgggtcatatttaaagacttaatactcaaaaggtagattacctatgaagatttaagaaaatttgaattaaacatttctaattgaaaaaattccatggggacattaatcacaatcagtgcataatgaagaatattggtatatattaaaagcataattgttgacttttaaaagagttttaagttcctctgaacattgatgttcactaaactggagttaattagttagctttctctatatatagattagttaatagttgattagtcaagtattataaatattcccagaagtggtgctgctgtcttacagtgtcttcaagaaatgtgaagtcaagtcaggttatggcttatgtttttaagtagtaaattatgtatcagttctaaaatagagttcagcttaattgttaaatagtataaatcagcaaattgattccttcaatgcatatgtgctccagtttaattttcatttgtggacacattttcaacgcaaatcacaggtgaccttaatccaaggaagaaatccaaggaaaaaatttatacacatacataccagagactgttgataataaaactgaagtgctagtgtaattgattattgattatggtaaatgtatgtaatattgtaaaagtgatttaaagttacatcttgatctgtcatctttctgtctatctatctagctagctacctatctttctatctaaagacacagataattttacctttttaaaaaaaaaagcaggaaaaaacatcttggaggaatacagatgaactgcatgtccaaaaagtaagtatggaggaaaaataagtaagtgaggctaaataagttctttaaggaagaaaagatgataagatactttaaatatatgcttatttttataaggaataaagatattgaatacctcagaaaaaataactagaagcaaggacctgtgaatataataaaaacagtaaattcggaaaatactgagtatttgattatcacctattttggaaaaattgcatatcaacttttactttcatatttctcagaactactagctttcatgaagtgtctttcagtgagctgtgttttatttatctccctttatattatgaatctagcccagtacctgatgcagaggaaccgttaagggttggctgttgaatattactatatgtatcattttaagtgaattgcgaatgagagataagaaagaagaaactattgagtcagatatgtatcaaaagtaataagaacagaacatctgtttatgagaaacaggaaagacctcaattaccctatgggactatccatggagagccttcatttattttgtctttgtctttcagaaaacctcttaactattattgttaatttcaattaatacttcggataatgccacacattcttgtgagcaagggtaaccttgctaggttcttccagttttctttattttggaaaagataagttgttgactttaaatgctatatatatatttttttaatttccaaagtgctttatttgcatatgtgaatttattacattttcactagatattaacgatctctgaaagtgcatacagacagccctcactttgcacagtagtggattgttaaagtggcagtgcaaattaaaactgtgtaaacaaatcatttgaaaacttacaattgttctgtgacatttaaaattcgtatcaaagcattaaaacatttattcctcttagaaatgtgtagaaagataaaaaacaaatatgtatttaatactctaaaacattagaaatattgagaattaaaatgtttttttctctgtaaaattcttatcaataatagttgaagtagtgttttccttctcctagtatcatttattattggtaccacaagcaagaatcttttctatgccttgttcgatggttatgtatctttctaagtttggatcagcttccaacattttattctttactcttttaatatcatggaatatctgcaagcgtttatttaatgtttttgtgtgtgtgtgtgttggtgttacttcatctggaatgtttacgtctttatttgcaagtgtttatttaatgtttagtttttttgttggcgttacttcatctggaatgtctatatctttatttgttacaaccggatttctcatttatgccaatgtcagccttaaccaattttctctgactttctatcttaaagcctctgtaatggagacagtgtcaacatccctaagccagttatttcttccataactccatttacctttgatttcaatttcacttacagcatcatcattttagtttctcccttgaacttttatttttgtcggccaattccttctttcattatacgtttttggtaaacatcacgtgggtttttcactgggaaacaaagaggtaaggcaaccacaggctttcccttctgcacgtgaattgaatacatgctcagcagccaatcaaaaacagactatgaagaagtgaggtgattggtcatcggtcatgataagcatctgttatttacataataatccatgtgctgaagagttagcagtgaagtttatactttatgccagtatagtcaatataccatagtaactgaaagttgaaatgtgttatgggaagcaggtattatttcactaaacagtggaaacgagtttcatgcattttagaactgcaaaattgaggactgtttttattattggttatggatattggtcattttattatatgtggacaaatgtaaaactacatatttttttaacagagatacattttttatatgcttactattttaaatatagacttgctatattttataactgcataaaaatttcaataaatggtcctatttacactgcacaaacttgtatacataacagatatctgctgaatgagcagaaaaaacaagctggctgtttcagatccaccaaggctgttttgtgcaagaaagtgtctgcagctttgtaggtccagaaacactgttacatcaggacactcattgtttaccagaccttctgagattgttttattctaatcaaaagagcaagaaagcaattgataagctggataaaaattttgaattgacaatcacaaatataacccagaattgaacaaacgttctgtggttggtttataggacatgctttcccaaataggaaccccagttctgtcttcagctgatgatttgaagggcttgaatcaagagtaaaaatgtgagtaaatgacaaggcagtgttaaatcactgtaggtttttcttattattatggcgaaatacaatgaaaagaatttagctagtcgaatatctctttcagataggcacatctgagaatttagttttatgaagttgaatgtactacacatatatatggaatttagttttacaaaattgaaggtacacatattatatagttttaaactattgttagttaattattattggatgaatacatttatttcattttgatatttggggctttgatgtttcagaagttaacctttggaaacctaatatttataaaaatgtgccttggtattactatgtaaacccaaatttaaagatatataatgtcaaaattttaatgtcactgtatctctcaactgtaaaagcctattagaccttttttctgtatcttcataatagaatagttttgttacgtgatgcagtttttgtgtgaatcttcagagaatcacttttattattcttactgaaacctcatattatattaaacatatccaaatacattccagaaggaacacagttaattcttgaattttttatggtatgtcaggtagtggactaaacacttcatgcatatcatatttagtgttcacatcttctctattagggaggtattatccccattttatagacaagtaaactgaggctcaatatattaagcagtgaaattagtttgacttaattctaaagctgaagtattttctaagatgtgcgtggcaatgtgaaggcctgttcttcataactttatctgaatgtttattaactgtactagtatgatatgtgaagatggacaaaaaaagatgcattttttaagtacatatcctgatggcagcaattttttttaaaaaattcagttttgttcagagtcaaggtgtcatgcaggccacaattttcagcaagcaattgccaaagcctgataaagggaaattttcctgcctgaaatggccaggcacgcgatgagattgggatgagttttggtgaaagcacttataaaaagctaagaatcaaatgaggaaaccaagtccaggtgatatgaccatcagtggattaatttattcacttgtgtgtcagtggacctctgttaatgagctagtgtccttcaaagtgttagacattatccacgggtccaaagtgggtgaaaaaataaaatgaaacaaaatgaatgagtcagtaagtgaaaaaggcaaaacaaaggatcaataatcagttttagaacatagaaaagtagatgctggatcatgccttaaatggtactgaggtttatacattttgcctttactgattattggttttggtgtcacctggctcaggcaagctacactaaaggtacaaataaatgagatgggctttgtattagttcattctcacgctgctataaagaactgcctgagactaggtaatttataaggaagagaggtttaattggctcacagttctgcatgactggggagacctcaggaaaaatacaatcatgatggaaggcccctcttcacagggcagcaagagagagaagtgctaagcaaagggtggagggaagctccttataaaaccatcagatctggtgaaaactcactcactatcatgagaacagcatgagggtaacagaccccataattcaattacctctcacaggctcccttccatgacatgtggggattgtgggagctacctttcaagatgagatttgggtggggacgcagccaaaccttatatcaggctttaagaaaatggtgaaggttgttagctttagctagtttccaagtgtcaacagcagtattgccagtattcctgcttttgcctttttctcgtgaacctaaaatttatattagcgatcccagttcacctaacccaccctgcctgttatgtcatctttacttctacactactgaccgtaccttactcatgacacttgggtttattgccattttttacttttttaacttttgctttctattgatcagcacagatcaaggaattaaattatgtgtttgtttattattgtggtgtttatttctagtgtgtctttttccttcctttctaacctttctacctttccaactgaccatggttttgcttcaggaaaaggcctacatagccaaaaacagcaaagaaaatgtcaaattgttagttttcaagtctaaaattgatttttcaaaattcgtggcagaaaccacagtttaaaaaatgtttgagttatgaagaccatcctttttaggaaggtaaagttcatgcatttggtatttgaccaaaaaaaagagaagccccaaagaaatctatgcatgaggttaaagagattatatcaagagggaccaaggatttacaaattccatttactgaagacgagagcctgtaaaggagctatatgaatgtcagtggaggccaaccagagtagatgtcagtgaccccccaaaagccaaggccaagataaggcatatctttgtggatgctggtaatgaaagacaaagccagaagtacaaggtggtggttgccccagaaaacatgatgccgtgtagaaacggggagaaaggagcatgacattgtaaatagaatagaatagctaaaagcgactgagtttacctatatttccctatgttacatttcctgttataatgcagaaggaaatcttataaaagacaattacttcagtagtagaaagcggttttaaatttctaacacttgagtctacttccactgaatatggcttgtgggtgtagttggcctttcattgtgcttaaactgccctttaaccccctttctgtttaggtgtctggcctatgacttctcccagtaattttgctcttgtcctcttccttgcccatgcaagacctgtacgcatagacacatagctgttctcttgggagcacccttctttcaggaagctctgtgccatttcatctctctgaatgttacaaatagatgcactttcctagtatccagtttctagaggcttagattctaatgaatttgatctgttacattgacttattgactctgcctaaatgttcccaattgtattccccaaatgaaatctaaataatgtggtatttgaggacacacctgtgtatgtaatgtatcatattgtctattttgtgaggtattacaaagaagagaataatatttaattcatgggaggctattatatttactccttatgcagtgttttcatgtgcattacctaattttcaccttagatttatgcaaataaattgtaaatgatatctctgttttccttaagatattaatatgcagaaataacatatccataagctgtaaacataatagaaaataaatatatgttgataaaacatggaaaaatgtaaaaatacagcaaacacataatcatagctaaatgtaaaatagaaactatattacatttcatttatgtttttgattctgtgattttgataacttaagatactactttttacttttggaagcataatggtgcacactaccttattgatatggactcatgcatactctcataagaatcaaggtagagtcaacataagtaactggttttctgcccatgtataaattccaccttcactacatactagctgtaactttaaagctttcttttatttcaaatctgtcattctgatttagtaaacatggcacagtggccgtacagataaaaacagcaagttttctgtgattcactagctaatattgataaataatggatttaaatgtaaccatttctcaaaaaggtcacagtcatgtgttctttgctgatatttgaggtaaccagaagaataaaagaggagggaaacaattccttaagacctatacacaaaaaaataaatgaacaaaataagtaaagttaaaatcattttgtctctcaatcatgctttcatctgttgattttataaaagactactacttgaaaatcatagctttgacaattataaatagtgtttaacaagcatttccagctctcactgtctttggatatgtgctaacctgtttctgttgggtctagcatgtggcaagctttggccaatgaagtgtaggagtagcttgtgtcacctcttgtctgaagccctttgtgcaacattgatgttgtggaagcactagttaaagtgaaggtctgtcttcctgagtgtctgagtgccatgatgagagagccccctgctgaccttaaccagagatgaagcaagagtaaaatatgcacacttgtgttaaaacatgactcttcaggattgtaggttactgcgtcatagcctcaacaaacctgactattggaatgcttatgtagattgtgaatcactgcatatatttgtattatagtttacttttaaaattgtaaaaaaagtacaatttttactagaaacacgatttttacttatattttttaatttaaaggggtgtgacaacttgataatttaatgtagtttaatttttttaactcctcacaatacaggatttctcaggttatatttaatatatggtatagattttattaaggttttgggcgcatacaagtatatttggggaaggtgaattgatcattcataaaattttttggcacttaactaataactcatggatataaaccaaaacaattgcagtcaaaaatcaatgaagttcaggaacacttttcactagttaactatgcgtaaagctctgtgataagttttgaggggggaaaaagaaaggaaaatacttgagttgttaacatatgattttttaaaattaatgatgctcagttataaaaaatccagtggaaaatatcattaatgtattctgaaacagtttgaaaaagccactctgtgaatcaacctacttttggttttagaatttatttacttatttagaaagaaagaaaacagaaagacaggcaccattctctgtatgttattttcctgaaaggtgttaaggcaaaatgaaaaaaaactctcctctataattatgtaatatatcctaatctcttattatgctttatgattttataattctgtgtaaaatctgtcatagttttaagtcccatcacctaatgcatgcattcttgtctagtctttttatgaaaggattcattcttgtgaatcaacaaggcatagacccagactaagagagctttcatcgtttttaagaaagtgacgctagcttacagtctcctaggaaactcaaaaattcagcagctgtagaaagtccaagttttacaaaacagctattattgggggtgaaatctcccaaggatggattcctgcaatctcaccttatttttaaacatggaataagaaatactttaatagtatttaggttagtcatttgttagtgagcagaaaaaaatcagcaaaacccagatctggacacttttcatttcttgatctgagtggaactgcaattaaactcaggaaacttaacaaaaggctgattatttgaagggaatggtcatcaaacaaacactgaaaaaatacaaatccagaaagcacacacagaataatttattaggcagtataatagcaattaattaagaggaatgtatatatgtactggaagaaatatgtattctaaaatataaagtgtaaaaattaacaatacatgaaatagccacattatctccatgaaattaagagtttgcactaaatgaacttcaaaattgctatcgagggaaaaaaatccataatgcttctgtacttttatatgtgtgttgcatgctcagtttgttggttatgttgtcttttggatgctaagagaagtacaatggaatattgcttttagaaatacgtctgtgttttacactatcatgctactatgaaaggtaggcatgcacttgctgtcatgaaacaaatagagtttttgtaattaggtgaaacttgcctaaagttagtcattttgtttttgtgtgttaatgacttatttattatcgatacatcttgatgagaaacatgcagagtttaaagatggaaaatgaaacatgttagtaccatttatctgacaacaaaaatgccaaatgagaaaataatcgtggttgtggaattttcagtgtattgactcaggcttaccactacagagtagaagaacaaagaagggtgtctttgatatccagtggctataggtcaaaagttgattccttttcagtattatttctttgcctttggagacattaattaacttttttgaaactcaatttccacaagtgaaaaatacatatgttatgataatctcaaaatagttttataaagtttccgaatttatgacatgttatcttttcagtaaatgttgtcctcccttctcctcctcctcaccgtagagacgtaagttgttttcaagttataatcggatatttacatgtatttattagtacattagtgtattgtatatatctgcatgtcaaatgcaaaatacataggatggaaaaataggaacaaagaagtatttgccatacatgttttaaaaaggttttctagtacctattttttttctcatggatagagatgctaacacatcgataacttctacttcatacttgttatctgccaagcatttgtttcatgcacgacagtgaacaatgtaaatattctttgctcttgtgaagcatatattttagtaaagaagagagaatgagacagttagtcagtaaacagaattagaggggttaattttttttcgaagagggtgcatttaagctaatgcaaagttcctaagacaagaatgagcttggaatatgcaagaaatagaaagaagggcctgtcggtggggtgcattagcaaggtgtggtaacaagctactaagagtctttagtaatctctgccttgggtagtctgttctttcattgtaccaggattgatttgcgtgatcaatacaatatggcagaattgatggtctgttacttctgagatggaggctataaaagaaatggtagcttctctcattgttgctgttttttcttactctttgatcacttcctctgggagaaatcatgttgggagcagcccagtggggaggtttacaaggagaaaaactgaaatctctgccaacaaccctgtgtgtgagcttagaacaaatcccccagtctcaaacaagtcttcagaggttgctaccctagccaacagcaagttcattaaccatcctgagacggaaatgcttagctaaatttcttccagatttctgaccctcaaaaaaaatggagcaataaatgtttattgttgtaaacacaaatttttgaggtagcatgtttacagaaatagataatgaacacaaaacagagaggttagaaatgaaatgacatgaagtaggacttcatagacaatagtaggatttgaatgctgtttaaattaatgggtagtaatctgaaattatgaagggtccatgtaacattatttgactttgttttaaataaaaatgaatcaattatggagtacacagtgtttgaaggggcatagaatgaatcaggatgtcaagctaaaaggagttgtccaggtagatatgagacattgattagagtagaacagccaaaatggaagcaagttgagagttctgcgatgcaatggaagacagaactggccataaatatgggtatccttcatatacatgattgcttgcaatcaacaagaaaaatacaaggcaagtaaataatgaatttactaatggcaaaaaaaatgtgttttaaagatgctcaatttcattagtattggcaaaaacattaataataatggcatatttttcatcctgagaaattaaaaagactaataaaactcttcattggcaagactggaaaattattcactttcatttattgtagataagacactaaattgatatagagtctctaaagccaatctgcaaagtccatacgctttcttctagggagtgaatttcacggaatttttcccaaggaaatgtttgcaatattaatgaacactcattgttcattgtaagaccatttataatagtggatacttggaagcacctcataggctcatcatatcgtatataattaatcttgcttatggcataatatataaaatacatgttccaagagggtatgtttatcattaatctatatatataagtgtaaaactatatatgtccatgttatatttcatggtatgtgtacgtgtgtatgtaaaaaggcagtatttaccaaaaaaaggacagtagcttgaagccaggaatttgagaccagcctgagcaacaaagcaagacacagtctctacaaaaaatttaaaaacttagttgggtgtggtggcatgcttctgtagtcccagctactcaggaggctgaactgggaagatcacctgagcccaggtgttccaggctgcagcgagctgtgtttgcacctctgcactccagcctgtgcaacagaatgagagacatgtctcaaaagcaaaaaaaaaaaaaaaggaacagccaaatatgattatttctgggcaatatatttaaatatgatgtttctttctttagatttttctttatttagagattctttgtgccaacattatttttaaatataaaaataatccaaaactgttgacaaaaatgtaaaatataaaaaagctaaaacattacctatattatgactttctattataagaaatattacaaagttaatttcattacatttgtcattttctccaaatattttctttatagtaataattttagatcctttgtagtctttatgcttacatctttaggtctttagaaaacattatttttatctattggtattaattagaacagaagaaaaaatcatgagaatgatgggaaaaagtaaaactacactgatcattaataaaaaaaaatcaggacatgtaggaaagaaaaaagaataaagataaccgctacagatttagtagagttatcagtttctatggttttcaaataaaccataggctagtcacaaatgttttaaaaattgttaacatgatatttttgttctgagtcaatctttgaaaaacagtttagttgtataaaaactatttctcaaaaattattctcccactgaattttagtttattcaaagtatgaggtacttgtgataagaaatatcttatccattaaaatactgctttatatttgcctttttagagagagaccaaagatcaaatctaaaatcagtaagaaatttctgcttttcatatttatttgataccagtccatctcgtttagggtttattggagttcttaaaacgtctggtaataacagccataataatagtgtgttacttatgtaattattaatcctgtttacatttcacatgtattattttattttatcattatcacaacatggagtagctttgattaatggttttcacttgcaaaataagacaactgaagctcagaaagattacatgacctgtccagcactatagatctagtaaatggtggtgcaaaaaaataataccagagcccacaatgaaatcatttcctcaaaaactatatctgatgtttttttccatgcaaggttaatagacatagtcacacagcttccaaaatgtttcctttggtttcactattgaatagggacaggtcagttttttctgaaaagtgtcattccacccccgtttcccagcctgtatttttccctctacatattaactatcttagttgccaaatttcctacttaatttttgatttaaatataattgtgatcttaattatattaaaaataacttctaaaaactttcaacatattttatttactgcacgttagcattaagggaagactctaatcctaaaggggcttactgtggtaactcaggacacaaactattttatagaaaatgttggacagtaagaaagagcaactggtaatcaaatgcatttgttattgacttgattcttatctgtttgacactacccagtggatatgagctgactttgcttcaaccacggtgtcactgccaatacttaatttatatctagtgggagaagaattatatatttttcttgtttaatcctgtacccttcagaagcttatttataaagtaccagttggatattatctagttttgttctacaatttattaatatgtatttgaatattcttggtgtacgttgtagggattagagtaccaaaatttcacacgataagcaggtatatatttcctctaaagtaaaagcagctgcaatatataactaaacatgtaatttaattctttaaatcctgtactttaattttgtttatagtttttgtgtgtattatgtcaccaaagtctttacatctgaaaaaccaaattgttcaacccaaccataactaaatatttgaaaaatgtaatttgactcataaagacttttttttttaataaacacttattaaaatgtactgtgtgccaggctttaagtctcacccaagaattctgcagagtgaggccagattttcatacaactggatttcattcacggtttaatttctcttgtaaaagttgaaaaatagcaatctagaatacatttggccattgacggcactttcaattttgaagctgtactgaagctgtcacactaccatccaaattactgtcaaaaatgagtatgctaattgaaaagctctggctatgaagttaagtgttgcagttttatcaagcatagataagaacactatataaaacatggattttaaggtgaattgaatttatcaaattgtaagggcaggctataatttgaaaatcctacattagatggatttttcaaattctaatttgttgtgaataataatgttcagcagaagagaagagctgtattttcttgcattccttggtttaggatttttagaataaggacatttctaccaggattcaaaattccttactagcatagctcatgaatctcctccctacttattgtattggaaaaactatccagcacacaaaatgttagcatttcaggaatttgtaatcaactgataaatcataagtatttgtttataagtcagatcatacatctaaaaacttatagggtaaatcaaccccactatttgctaactctcgggtatcaccataggctgttctgtgggcaggagtccatattttcattgactacagttatgataatggtttctagttttacacaaatatttttccttctgatgtctaactaattgtgaaaatagcataacatatcacatttgtgaaagttatttagctgctggggtcactgctactgtgaaaagatcagtcataatttgtgcagtggttggaatatacttttagatgtcactggggaaaaaaatcttggctttaaaatgcctttgtaaagataagccagttgtaaggtgtgattccattgttaagattaataatatgaatgaccagttaaatatgggtctgtactgactggaaactcttgaaaaatgaacttcagatatttgaattgcattgttttatatgcacatcttatatattttaaatataaaaggtagctaaatccatgaattagctttcacaggatatgattatcaacatctcatgtaccccacaaatatatacacatactatgtacccaccaaaatcaaaaataaaaaagtaaacttttttgcttcatgtggcaaattgcaatagctcttttttctaaaagtatttctaattttatttcttgtgtttttcttcatttcattcaattattaatgaaatattttaaatgttcattaaagttcagtggaaatgccatttccaccagttttttctttcattttttacattgctgtaagactttgacaatgtgttgaacctctaaaatatttgtcaatcatgctttcttgtaaatatatagtcaaactgtgattcaattacaatagtattttctgtttctcaactgttaactgtttgacgatagtaagagtgtctaattcatccctctttcctctagctgttaacacaagatttggcatgggttaacaactcatttactatttaaagataagaacctttaacagaaaatgccagtcatataatgtaaaggaggcacagggtatgtattttctgtgtataattcaagctaaatgttaaatagcacaggctcataattattttcttaattcgagtatgtaatgtgttttgtcttgctggagttgcctccaaagccgttgtagggggagttccttcaagggactgcttcaaaccattccatgaaggggccagttgggattacaaagaaggaaacactaaaagccggggtgatgagtccaaagcatttgcagcattaggggaacttacatacagagggcttcagcgtcctcatgacagaaaaaaatacgttctacccaagtatgtccttaaccagagtgtcaccctatgtagtttatataagagtgtcaggaatttggcccaggccgttgctagattctatgtgtttggcagcatgcttgatatttcagggcttgggaaaaccacctaaacaacttcctgtgggccttggagtactccttgataccttccaggccccagtttccccagtttgggtttaagcctgcagggaaaaacatgaagctggctgggtcactgagcactaaaggcactctgactttctaggtaaggacaaagaaagaaaataggggacactggggactctacatataaagatacaatttcctctgtgtttaataaagtctagggtataccagattaatgcaacaaaatatgaacaaaaaataactcatacaaggcattccctggtagtttcatggatcttttcatgagactaccagggaatgccttgtatgagttatttttttggaaaaacctgtatattttgattttattaaaacaattatttggagattgcatctttctctaccacaaaactaccagtagacattgtcctttatgagaaggcaaaggatatgtgactgaattggttctaccacttatcgaggaactgaacttagttccttaaactagtaactttggcttttaattcaattaaatacagattataacacagagtcagtgagaatatcaaaatggtaatgtaagaggaaaaagggctcctggacatggtgtgttttttaataacaataattgaataaggggatacattaaagttctgcttacacaaaaagaaatcatcatgcatatgtttcaggaaaagtatatttgttgtgtactatttttgttaaaaaggcaataaaattaattcttcttagagtacagtttcaggcaaaaagattattctccaaaccaaacagtatgtttacttttacttatgagaaggaaataaaaaatctattgtattttattttataatctatatttctaagaaactccaattcaataataaatcacagtagccatattgtaacaagttttgattattctattttattttgctattcatacgttacttctcttttaaaatgtaagtctgtattcagaagggatgagtactagagttgtgcattgaggattgaaagcacagagatgttatttaatactatgggattggttttgagcccggaggcatggaaatgggttggcagaagtgatatcaggctaagctctgggacacccacaatgcggaggtctggaagatgaggttaatcccacaagaagatcgaagactgagatggagggagaaccaagagggcagggctccagaagccgaatgcaggcagtgcaaggagagagaagcccactgtgacacatgctacggattaaggaagatctgatacagagcagggataatccattcacaggaacgagaagaaagcacagtagatggtaacagaagcaagatgcttggtagatttggtggaaggggaaaggttaaagttctcttttatttcttttttcttcccaacaaaattagaggcacatttattttttgaatgggaggaggtagcgggggtcgtttcaggtttgaggaaagtgggagaagacatggaacattccactccactaaaagactaggagctcaaatggacaagggagaatttctatcctctcattggtctgtgaatttttcagtattatattcattagatataaagtttcatagatggtttctggcatagtagattaatgtttattgtgtaaattactgagacattcacttaaagaatcacataattattgcattaaagcctgtgttgttaacatgttgaatgttgcccaactttaaatgactgtagacattctcttattttaattatgataattctttcatacaacattttagttttcctcttctctgttaaaaatactgtgtttttaacatttaaaatagcttttgctttcttttcctttttaaaacggcataatattctatagtgattcattgtgttttgtttttacccagcccctatcctccctcacactttctctcctattttcctttttctctgagacatattttgcttctttttcagtttgcattctgctctgaattctgattttcgcttagagaaatatttttcatctctggacaacagagaagcagtgtgaaaaaagtagctatttttataaagacctggcctatccttctcattttttcccgcttgcttgcctgtttctattacaacttctatcaacagtgttggctttctatttgaaataaagttgaaccatatctggtgcctggacatactttaaatacacctcaaaatgaactgaaatgtttcaggtccttctcatccgtcaaaggctgcagccactactctggaagttattttttgacacactgattgctggatggtatcagtcctgataactccatttaagaatcctatgaagagaaaacttttatcggtctgtcaccatcaggccttatcacccacaagcaagtggtcaagctaaaagaacagtgcagatcataaagaatgccccatagcagattattataggagattagtcagcaagatgaaacaagttgcacaggattcatctttgcactctcaagtcaataacaagtattatagtaaaagcatatctttgaggcttccttaaactacttccatgcagcactggcttcgtaggattggtaagaatgggatgtgttcttttgctctcctgcacgtgatgctgaacgtggggtgcatgtgttgcttttctgaacagcattcttttttcacaaaacttcgtcttttccaggtgttagcattaagttctctttatattaggggtattgtggtttttagaatttaagacatataccagtggttctcaaagtgacaatatccaccagattcatggaatatagctttcggggttctgtgaggttaaaaaccaaaccaaacaaaactattttcatgataatgctcacacagtaggtgcgatttttcaacttcttgacctttgcgctagtaggcaaaagcaatggtggacaaaactgctgctccttagcaggaatcacggtggcacaaaattgttttagtaatcattttattcttcactgtcacacaatcacaggaggggaaaagccaatttcatttaagaatgtccgtcaagaggcagtaaaatatactaatgttttatatctaagcacttaacggtgcactattggacaaaattgtaactgcatattagccattttctgtggcaaacagatacaataattatcttgaggaagaagtaagtgtggattatttgagttgtgagacaaactagttgctttttgtttcttttacacacatggcctattactgaaaaaaaaaagatgactgggaaactatgattattaagactgaggtatttagcagattttgttttccaaaaacgcacaaagtgtgtttgtcaattcagggaagtactaggaattgttatcaactcttaacgttgacaaaatttgtattttaatcagtttatcctaaatagaactattttgtattgtaaatgtttaatgtgtattttctcaagttatttaagattataaggcttaaagcaatgcctcttttttttgattggcctcatgataatttaataccaattctgggtttttactatggatatttatattgttagatagtctttatttctatttgtatgacctcagctttatactaattgctttattcgggagttaagaaggtccaaaagttccatataattctctaactaacattgagttataatcaatcatgagtcataatcaattttgctgtagcttgtgtagccatcatttctctctcccttttagtgtgtgaatgtatatgttctcaatagtctgtgaatacttgtgaacaaagaaaaaaattattttctacagtatttattagaaaaataataagcattttgagtatgctttttaacctaactctcaaatatcctgatatatcacacaagttttagcagaaagatgtggcaggcttctcatgagactctccaggcatatgcaaatctaaaagaaagataaaatatctggtattttattttttaaagccctttgctctctacaaaaattgtattctttaaacagaaatgtgggctattataagcaatgtttcattttcctattgtctgtttaaaaatatcatttgtaaattgcagttggtcttgcatgaatgtgtttctaaaattgtttgggaattatgtactaatagacctcctgggatatactccttagtttacaagggtcggtgttaatgttctgccataggaaaagcttagtaacaagagtggagatgtcatctttgccaaaagctgtttcttaagtctaaagagcatggcagaacaaagagcttgagctactttaatgatgccaatggtactacaaaagtggttcccaacagctgttgtaataaaccactgatcagtatctttttggggccctgtggggaacagaataacagaccaaacacacttcagggcttcccagagcttcttcccctttaacatgagtaattctgcttttattaaacaaaacaaaacaaacctgattcgctcattatgtctattaaattctgacttttttttttttttttgaagtttcgctcttgtcgcccaggctggaatgcagtggcatgatcttggctcactgtaagctctgcctcctgggttcaagtgattcttctgcctcagtctccatagtagctgggattacaggcgcctgccaccacgcccagctaagttttgtatttttagtagagacggggtttcaccatgttggccaggctggtctcgaactcctgaccttaggtaatctgcctgcctcagcctcccaaagtgctggaattacaggcatgagccaccgcacccggccatattaatttcatttaaagatgcaattttcctgagtgaaaaaaatgaagtcctggctagtgagtccttcaggtcaatgttatatttgcttggggatatgtttactgctagtaagtagcataaaagaaataattttattagagctttatccagcctctccttgtggcattacccttcagtgtctttctcagccctgaatgctaagccaccatttagaatccttattgttaaattaccataaaatagagtttcaaagtaaaaaattctaccagaattagttaagttaaataaaacattaaaatctaccagtttacactcagtttctctccccacttaattcatcaccactctcttcttggtaattagaatattaggtccatcttggtcctaatggttaggtcaatgtttggaaatgcagctttcaaagattattaagtcctgttaccagcttttgtgaataagttcatggaatgtccctgcattaattgtctttgtttctgattacagtcttttaagaaaaatttctctaaaataacttcctggtagctattttatatacttctatactctgacataattgtcttcttccttcagtaatcataattacacaaacctccttcagaatcattctacattattttcctgggaaagtttaattataagttcaaaacagtggggatattgtgcgtgtgtctgtgtgtagaatttgcaatgtcttgtatttaaagaaagaaaatcaattcaaattggatcccaaatactgaaatgaatttttggaaataagaagttcatgggtaggactagagttcagggcttcaggtccgcttctctgagattttgtgtgtgtgtgtgtgtgtgtgtgtgtgtgtgtgtctgtctgtctttcatgctgagattgtgtgtgtgtgtgtgtgtgtgtgtgtgtgtctttcatgagaagggttttttctaagtcaccttgtttgcacatagatgtacagttccagacatcatattcaggaaaataaaatgtattttcttgcgtttattagtttaggatccatttattatttttaagatgctcccagcggacatgtgcttgacgagaagtgaaccacatgccatgtgtgaagggattagcataattgtttcaatgaaaacaccactctgaccagtggagtgttgaagggaaaaatacttgactactacacattgctagatcccatgagagattatataaattaaatataatgtggaaaacctgctcttaagtgctttatagtttacagagagttaaatatatatgtagcatatgaataactctgatataccacaagtagatatggctgacgaagtgtctttcaccttgataggacggcctgtttagtttaaggccttaccagttaggcgggctatcttaacacctgcttggtccatttagcatagtaggtactcaagaaatactcaccaatgtgtccgggcgcagcggctcacgcctgtaatcccagcactttgggaggccgaggcaggtggatcacgaggtcaggagattgagaccattctggctaacacgtgaaaccctgtctctactaaaaataccaaaaaaaatagctgggtgcggtggcaggcacctgtagtcccacctactcaggaggctgagccaggagaatggtgtgaacccaggaggcggagcttgcagtgagccgagatcgtgccactgcactccagcctgggcgacagagccagactccgtctcaaaagaaaaaaaaaaaagaaaagaaatactcaccattggactttacaaatacttgaataaacgaagaaagctcaaaaagaattaaaattttaaggcgataatttttggggaaaaaaacaatgtcaccaaaattcttgtgtttttaaattttaaaatatttatttgaagaaaaaggattatgtatattcagtgtacaatatgatgatttgatatatatcgacattgtgatatatacatctacatataatgagcatcacaatcaaattaatatatccagcaccactcatgctatatattggatccccacaacttattaatcttatatctgaaagtttataccttttgatcaacatttccctacctccctcatgctcacagcttggcaatcacttttctactctctgtttctatgagtttgactttgtaagattctatatataagtgagatcatacactatcggtatattcattgtggaaaactttacagtttcctagagaaatgaaaataaaactatcatacaatccagcatttccatctcttggtgaaataaatatcttgtagaggtttctgcacctccttgtttattgcagcattatgcacaacagctaaaatatgaaaacaacttgtattgatcaacagatgaataaagaaattgtgaatatatttatgtttcatatatatgataatgcaatgaaatgtaacagcaataaaaaagtaggaaatactacaatttgcaataacattaatgaacctggagaaaatcatgctaagtaaaataagccaatattattctttgacattacagattctactctttcattatttcactcagcctgtgaagtcttattgaggattattggacctagtcttttttcttcaaagcatatatctttgttcgtgattctgcacttatgtgtatctttccttgattaatcgtggtctcctttacttgatttcaagttctgtgaagacagagacttctctcatttggtcaccaatttaaacaaggatatggcttagtattagggtatactaaaaagtttatctaattctatataatgattgaactaataagtggatttattaaactaagttgcctgatatttatgacttttaaatatattaatagtgctagaaataactttccatttagttagggataacttttcaaatcctaatggaaaatctcttggtgaatgctaaattgaagaaaattttccaatatttccctgttaaatgttcacttgctcaagcacctacctagactctcagcaacaaatacagaatatgttcttctaatgaagttatttggtaaccttgatgctcttcaaaatgagaatgcatcacctttttcttgttcaatagctgtgattaattatatagaccatcagcaagaagctaggcataggcgtacaagtcactataatacatgcctgtcctaacgagttatttattacaaacaacccaaagatgcagcgggggggcaggctatgattaaatctcaaaataagcttaggaacaagtgccttagtagttcaggaaggagagaggagatcattctgtctttctgcaagatgatctgaactgcactctgaaggcttagccagttcagacaagctaaaaggaaggggtgagggaccttgtaggttgagagaaagcagtaaggaagaatgctctaaattcatctactttatggtcttggaactgatcagcagccatgttaattaccgtaactcttaaacaaagggtattgctttgtttttctttctctttcatttctttcttctacttccccttacttccttctaatttcacttttcttctactctttttctgtttctgtcctattgctatcctttccttcccaatatttctcacccacatccatcctcaacacacatattattttacattatcggagttaggatgtttgacagctcccttacttggccccaacacacacttcttagtttctaatataagaagataaacctccctctccccagtgttttcaggtgactgtgttggcaagaacaaaagtacaaaattatgtttaatgttaaggttcttaattttatgttcatttctagctttttagactagtgagcacgaatgtaaatatatctatagttattcttgtcacctcctctttttgttttatggtttctttgttgtttgtctgttttacgttttattttgttttgatcatactgtgcattacttttcagaagttcaactgtcatttttcatttgggagatcatgataatgcatttgaaattcattcagagtctagataattaggcattttcttttagttctaattctcttttacatgttctccttagcataatgattacttcacagtaatattatagtcctttcgttactttaattaatgtcacatctcaattctaagtgcttgttttcagcccaagggtactaatttcatatcttgtttcttaaattagccgactatgagctcagatttctggtggttatggtagtcatacagctattccatttccccatcaataagaataaattagtgttttaatgaaggattttttgctattctctaaggtatttgattttaaaagaattgtagtattgtttcttggccttaagtttatgggaagcagtaattgctctgcagctaatatatttttgttattgctagaatcactcatagtttataaaatggcagaaaatgtatcaactaattatatgtgtcttaaaataacttttacttgattattattctgtttaataagccaatttaggaaataatgcagatttcttaaggagctttaagaagatttgtttatgaagtctttttttcctttgataatattatctaggaacaaaagaaaaacaaattatctggagatatcttattaatagtacttctaaacttttaggaaaaataagtaattctaaatgaagcttatgaaaacagaaattagtatttttatgtttattgcactgaaaattttgaatcttgaaacattaatagataagtgtgaatgtttaaataaactctattgtttgtgttcaagcataacctttctactttgttttcagtttttgtaaaatcccattgtgacctgaacccacattggtccctaagcactgatacttctccattacctcagtgcttgacttcttgtgcagttagtcatgttcatagtaaagctccaccattgtttgataattgctttaatctgctgcttatttcgttggaaaggtttcccagttacgtttgttccttgtatgctgtagagaatgaaagactttgcaagttttattagtttgttaggtagaaggataatgcattttctaagtatatgggtattcgttggaattaacagctttattaatgatttgcaaggataatgacacagataaattcggagtcccaacattttctttaaaataagaagttgaaaaacaagatgattccacttaactgttggcagttgttatatcatgacttaaaaaacaaatcaagtgattttcaatgaagaaggaaataatgttaattttgggataggaaactgattcctttagtggcactgtaggtgagttagtgtatgtatgtgtctatctttgtgtttcttcctgaggacgattttaaactgatactggcagcatggggtagattcgaataggtgactgattaagcctgcgtgttcacaggcgggggacgctgcttcggcagagcccctgaaatgaaaaaggagcctgtttgttttcaagaatgaggatgagtccagcttggttcaacacagagaggaagattactgtggtatttttaaaggcaattaaagtttaaaaaaattgatgtttatttatttttttgtgggttttttttttttttctttgagatggagtctctctctgtcaccaggctggagtgcagtggcgcaatctcggctcactgcaacctctgcctcccgggttcagtcgattctcctgcctcagcctcccgagtagctgggattacaggtgggtgccaccaagcctggctgattttttatttttagtagagatggggtttcagcatcttgaccaggctggtcttgaactcctgacctcatgatccacccgcctcagcctcccgaaatgttgggattacaggcgtgagccaccgcgcccggccatggatgtttatttgtacactgcaaatgtctttactgagtttatattgttctttatatctctgttggatttctcagtagtgtactacttcacatgatcattatttatagtatatttttagtgttgcagattttcatataaaatatctcagaagattatctttatgaaagtatgagtgattgcattctgacatgttaatttcaatagcttcttattagtatagtgaataacacagatcattccttcttttctttgtccttcacttctttttgtctttaaactcttccttaagaattgctcttcaaaatgtatttaataagacagtaccataatctctgagtacattaactgatgtcaaggagggacaggatgaaatcagtggtcttacttgatatttactatttgatataaactccaaataattgaagaaattttgcaccgtaattttagattcagatgcctatcatagctgaatgtatgaatgactttgaattgggctctaattatgaaggtaaagctataagggtttattcttccttctgtgtctgttaatcaactaatatgtggctagacatgatcaaggatacaaaatattcatgatccttctttgaggttcagaatccttatttaaagatagaaggattcactctagccagttgaagcaaaaaaggatatatcatgaattatagcttgctcactaaaacgtttggaagtctgatggaaaaggctatatataggctgagccttcaggaattcctgccagaatcatgccgttgaagtggcccatggatcgatctgctgcctgtgttacgattgggtatatgataaatcaggaagctgataccacagccgaaggctctagatctacatttcttcaaaagtgatgagacagggtaaagtgaaaaggacaattcattgagctgaatccaaaagagttattctacctgtttccaagaacaactgttaaatgtgacagtatgagcttccgaatgagcagtgcattctgatgaggatttggactgctggttttagagagaacaaaaatcgattaatgttattactagaggtttggaaatgcctaaaaactatgaagttagatatcaaaggcagcaaatactgttagattaggaaaagaaactaaagtcaaccttttaaccgaggaattttgttcttgattgtccatgcataatttgataacttaatattttaatatatgatgccatatttcattattaatttaacctcttaatataatctggtaaggtgattacttagaatggcacatggttaaatatggaaaaagtgttccaggcactccatatactgtataaagcctgagttttatgaaacaatctagagccctaatttagtaacaggaagaagatagttttgaatactttttcccatgatgcattgtctcattatattcattgtgaatttccacaataatgctgtacaaaagctgtcttaataattactgccataaaacaacaactatttattatttctcacaattctttgggttggcggggtgatttcttttcatctgagcccgtattgtctaatgtgggctgggtttgctcagccatctccagttagttggtgggttgactggaagctggctgggccatggatggacctattcagttctgtttcctatggcttacgtctttcaccaaggtagccctgtgtttttatatccaaggcaggggtcaaagagtttttggaagcatgcaaaacctgctgtgtccatcagaactgagccattgtgactttggctgcattctactagcctaggcaagttaacagtcatccagagttcagagagaaataagctacaactcttgacaggaggttggcagagctgtggtgcaaactatctattgcagtctcgtgtacacttgtgagaaacaaatccagcaaggtgattgtcccgaatgaaccttcctcagctgacttcttccttattgaaacagcaactcaatttcaagtaaacacatctcattgcagtctgtgtattttccttggtaatataattaaacaaatataattaaatttcaaaatatttagtgagaacatatgatttgaaaattttgtgtctgggcagggggtgctcatgcctgtaatcccagcactttggaaggctgatgtgggccggatcatgaggtcagcaggtcgagaccatcctggctgacacggtgaaacccggtctgtactaaaaatacaaaaaatcagccgggcgtggtggcacgcacctgagtcccagctactcgggaggctgaggcaggagaatggcgtgaacccggggggaggcggagcttgcagtgagtcaagatcgcgccactgcactctagcctgggagacagagcgaagagactccctctcaaaaaaaaaaaaaagttttgctatgtgaaatgcagatttttaaaaacacagtaaattatgtctacaattgtcgtctgttaatacccattcgatattatctacctttcctcagtctaatcccacccccgtggtgaggaattgtaacacactggttcccgagatcaacctgcaatgttgtaagatgctacaaatgtcttgaaatacgttcctcttctgccttatttctttaacaaatatgtctgatgcgcattgcaattaatatattttgctttaggaatttgatgagctagtaaattagaggaggtaatataaattaggtatttatattaataacccaaacttttctttataacaaccttatgatttaggtgttactgttatcctcattttacagatgatgaagtggaggtacagaaaaatagtgcacatttgaattcattcttgattgctttttttttttttttttgagacggagtctcactctgtcgccaggctacagtgcagtggcatgatcttggctcactgcaagctccaccttccggattcaagaccattctcctgcctcagcctcccgagtagctgggactgtaggcgcccgccagcacgcccagctaatttttgtatttttagtagagacggggtttcaccatgttggccaggatggtatcgatctcttgacctcatgatccggcccacctcggcgtcccataatgctgagcttacaggcgtgagccaccgcgcccgtcctgattgctttctaataacattcaagtagattatctttgacaaatgtaagggccatttcaaaaattaatcaacatggtggcagacaaggtaatgctgaccaaactcttgctgttttccataatatttttaaattatttacaataaaattataattcattcttatatttagaatgtaacattatgtgcaagtgcctgtgtgtattgcaatgatcacacaacttgagttttgcctgtttaacataacaaagaaatatcaagagcattttttcatcacctgaaacagtttaggattttcagaagctggagtaggcctctaaaatagtaaacttaggtcagctttcgagggctacatttgctaattgaaatagtaacaatggaaagcaggaactattgtggagacatggaatcagggtaaaaacttatgctcaggaaaactttgaaacttgagcaaaactcattgtgttcagtttctgaatcatgaaccaaacctaagaagtcgtttaaaactgagtcatgccatagaaagtttaagtacctttttttcttctcctaggctccttttctttagtctgtgatagcacacctccaattctcaccctagtgctatcaccatcctaaaacaactaagaataaaacttgcttctgcttctcttatgaagagtctcaatgagacatgtatgttaccatttttacaaatggcaggatatgtaaaactagaaggcagggctatgctggagcctgattgtatcattttagaaaaactcattgttacattttctgaaattttgtaagctgattgttaaacacagccattactaaaaattaaattatataagccagaaatataagctaaattaaaagcaaaggtaataaatgctcaaaactcaccagtttctaagtgttttattacatatactattacctatattctgtagttgtcttatgtctattgtacatgtctgcatatgatagaaatactatgtaactccgtattactgtgcattttttgaataccacattcagtaatgtcacattagtggctggtgtgccatttttgtgtgagaactatcatgaaattttttccaaatgaatactcatcatttcttcgtaaagaatatttattcaactgtatcatacccctgatgtgagatctagttcatctaactgcttcttggaaacagttttgaaatttcagggtggggagataatattttacatatatatgtaatatataatattttacatatatatgtaatatataatattttacatatattcatacatatgtaatatataatgtattacatatatagagacagatatatatatctatatatagatatatatgtaatatgtaatattttacatatataatatgtaatatataaaatatatattacatatatacatatataatatgcatataaaacatataatatacatatttattaaatatataaatatataatatgttatatataatatataatattttacgtgtatatgtagagatatatatatctatatatagagatatatatgtaataatattttacatatatatatatagagagagagagattgaggttttccaggaaaagtagaaaccacatattcttttttttcaaacaaacctacttttcaaaattgttaaaattgaatggatttaatgcagcacaatagtctctgaattgaaactgaatgaacttcattttccattcattttcagatttcatgggaagaaatgatggaaagttaagcaaataactcattcctttcttcactagtgtatgtaatttaaccaaccaaaattatctgcaaaactgttgctttagtatttattccatttaagccagagaattactaagcctgttcaaattttgtaatgtttgtctaacacgcgcatgaaaactggctacatccagtaatgtttcctagtaaagatgctctattagtcttatttctcaagttgttcttcttagaaacataaataaatacttgcttttgacagagtttagtgagggatcatttccggggtaggagccatgagaccagatctgacttccatttccgatactatcatggaacataaaaaaaaaaaaaaaaaaaaaatcgcagaaaaagtgtatttgaattagcgtaacctagtgaaaacattttttaaattagtatggtccacttctcagattttgtaacatggtgaaatacatccaaacaaatttttttttggtaaagctaaacatacacatccatacatatgcacaggtatgtacattcagtttagatagagaaaatgtcttctaacttttgatgtatttgtttatattcctgtcactgtaacataataaccatagtatcaacatattattaattattttgaataccaaccccatttctctacctatttgtgtttgtgtgtattctaattgtatgtgtgtgcagattgtgaaatatcatatatttgatatatttgttgaagcacacttaataaaatctaataatgcaagtgaaatttcaacagaagcttctgtgaaaagaggagctaatcttatgttttgtgaaaagtaatgacctcaaacacagaaactgataatcaaataaaatatcagtgtgtttgattagctgtaatgttgaaaaaatccaagataatttctcatacacagttatacttctgaaactgtcatacgtgtgtattatgaaaggtcattgtcatttttttgtaagttaaaaaacgttgatgctaagtagataaactacacagcaaagtgacgcttttaccttctaggagaaaaaggtagaagttaaaaaaactgcatctaaattttactctctcatctacttccctcataagaactttcagaaataactgatgcatatacattttaccatgttatttcattatatttttcactattaaaaaagaataagaatctgtcataatgtaactatattaaatttattctatttacatgacggttttatttgtaagtagttttttagataatccttaaatacattatttaagcataaaatgaacactgtaatatatatttagaaactaaatatcaagaaatacatttccaaatgtatttcttgatacattacatttcagtttttctctgaaacgaaaaactgaaatggaacatttgcaagtatagtcaataaatttatttattttattttttgatacgaaataattgtacgtacttatgcagtacattgatattttgatacatgcataaaatgtgtaacgatcaaaccagagtaactggttatctatcatctcaaacattatttatttatttgttttgggaatattccagatcttctcttctagctgttttgaaatctactataatttctctgtaactatagtagccttattgtgctatcgaacactagaacttgttttatgtaaatatattaatatttttatactcattaaccaacctctcttcattctgcctccctcaccttctcagcctctgataatcactattctactctctacctttatgaaatcaacattttttagattctacatatgagtaagatgatgtgatatttgtgttgctgtgcttggcatatttcattgaacacaacgtcttctagttccatctatgttgctgcaaatgacaggttttatttttatgacgaatatttcattgtgtatatatacgtatatacacaaactattttttctatatttatgtctctaaatatatacatttaaatttaaatatacgtttagcttccttaaataacacacaattatattaactagaaacctggctgacgcccagctcattgatgagacctgcagtttgtgatggccagcatgtcacacttgccacccattgttactacctaccattttccctttgtatttttttttaaagaataaatcaataaaaagcaagaactgtatgtaggaaaggaaatattacatattacatctgggtgtgaattttaaggaaggtgcaatccaacagaaaatatactctaggtaggggactgtagttcatattgtgttagcttgtttgtggtggttgttagttggtcaaagaacaaatatagagtgaatgagatttgtgagggttttttttttttcttttaagcaaagcatcactggaataagataaagtctctctttactttggtattaaaatggatgcatgcctggtattcacaggaaatttgtctaagggttgtacatgtcaccttgactttcaacttagcatctgataggagaactttattggcatacaaatgagcagagagggtgactgatgtagtgaactctgcattttgcttgtactgaaaagattaagatctttccttaattgagaattaagacaactaatgaaaaagagcaaaaatcataattgagcattttatattactgtgcccaaaagttggaatttatagatcctgtagaaacaaagtaaaagtagtgtcgaataatgatttattgatcttctgtgtaagtcatttaatttgattctgagtgaaatataaagtaaaatctacaaataaaatataaaataattgggctttgtaaggcaagaaaagaaaaatgagttgaaaagcatatgtgaagagttaagaaattatttgacgtcagataataaaacaaaagatcaatgcttaaattaaatctaccttggaaatggcaaaaatataattattactatacaaaatcaaatcagaattgtagcagaaacattagaagacatcagaaaataatcttagagggattaaagccagtttattagaagatattgtggggaccaatgtaaaaacatccaaagaatgaatgagcagaaatgagttaaaacgacagcaaacaaatttgacagccaagaacaacaaatattatcaaattttaaattattttatgaactgcttattaagagctatcattaagttttcaggtaaacaaattttaaaacgtataaatttgcatgtagatactgtggcaagtttattgatcatattagtctttataatgtgaaaacttttaagtctttaaaaatagactgaaaatttatatcagatactgtacagacttacctttatcaaacacttcttttacttttaaaaatgtatttaattcacaaatgaagattgactatatttgaagtgttagaacttaatgatttaatcattgtattatgattaccacagtcaacacatccaaatgtcttattaatttaattatagcaaataaaagaaggttaaagtaatgactcaactagtcttactagatttttaagttgcttgcaaattctgttgtagaatattgtctattttctactgccagctgctatatcacgtgggcttctatatcaaaaatgctgcaaactggatgggttatatacaacagaaatttatctccagtctcctggagactggaaaattcatcatcaaggcaccagtagattcagcgtctggtgagggctggcgatttggtttttagatggcattctcactttttcttcacgtagttggtgctagctagctcactgtcgcctcttttgtcgctgttgccaccttttaatactatcatgtgggggattaggtttcaatatatgaattttagaggagcgcaagcattcagtccatagcaatagttcagtgtaagtaatgatcttaagtatggtaaattcattgtatgatgaatctgtatattttcacgaggatctgcttatgcagcttctggtgatatgtaatgttagaaaatgcaaggtgaattttggacttagaaaatgcacctattgaataagaatacattattttttgcctgggatattacttaaagtagcatcattttatttaaataagaatacagaactcatgttctgggaagaactaatatattgtgctagatatggacctctcttcttactctaaatagtgttgtcagttaaattttaaataaggaacaatgagaaaaaaataaatgtataaaacaaaggctaactaggaatattatctaaatatattttaaataaaattttgtgtgaaatgtcttttgaattgttggttacaattttatgcactgtggaatagtgttaacattataatttgacatcatctagcagttggtaatacaaggctttgtacaactggaaatcatgcaaaggttatcttgttcatctggggaaattaatattgtcaataggattttattaaatgtagttaataaaatatttagtggaacatttcttttttaaggaatttttagtcaatactggcagtcctcaaagatgttgaataatatataatggtacgtgcatcaatctcccaaacttttatttgactgtgtaactgtgcttccaataacattttcccgaatgtaaaagcctaaatatattgtataacaaagaagtatatataattacactaattccgatagattattggtaatctgttggggatagtcagtagggatgaattactatgtttatattaacttaatttgacattttaaaacatctttgccaaatgtcaacattcatatctgaggaaatgctttaatttttgcttactctgtgccataacttttgcctctatgtaaattaccaatttttttttggtgtttttaacagtggtattaacttattaaataaaaaccagttgaaaatatgtttctgggtgaatatttaaaatggcaaaacatatgtccaaaaatataagctggtaatttattaccattttagttcacatttttctaaattggccaagcaaaaacaatgatatttagtttaactgaatgtttcaggtataacgtgatcaacgttattgatactaaactaaaaaacagagtgatatgttttaaattcttttgtggaattcattagattttttttgtttcctctgtgatccatatgtgcaaaaacgtaatcatgtgagaatgaaaaggaatagaccatttaaataagtttgaaatcctcatctaaatatgtcaaggtgtgttaacacttatgaaaatcacagctaatatagacatttctaactgatcattggataaatggtggggtttgtgatagaggcagagttatcaccattcaataaccatatctacaaccaatatcagataagttactttatttctagggtttaatttttctgggggggggctttaatttttttcagctcttggtgcccaggctgaagtccaatggcatgatctcagctcactgcaacctccacctcctgggttcaagggagtctcctgtctcagcctccctagtagctgggattacaggcatgcgccaccacactgggctaattttgtatttttagtagagatggggtttctccttgttggtcaggctggtctcaaactcccaacctcaggtgatccacccgccttggcctcccaaagtgttgggattacaggcatgagccaccactcctggctggggtataatttatatatacaaattagccttcatactttacttttaaaattatgtattgacttacatgtgtgtagaataatattgtattttttaaaatatacgtcaattactacaattttatatatagctatatatatgacactacctatataatagtgctgtatgaaaattgtatgcttctcaattttatgcatatattttattcaaaaggttttaacttaaattgtttcccagtatgtattgaacttctgttatggccaagatactagaaaagattctgtatacagaaaagtgaataatagaaagtgtgtatttatataaatagctaagtggcttaatttcctattgatattgtaacaaattgtcacaaagcttaaaaaccacacaaatatattattttacacttctgtggatcagaaatttgaaatgaatcatacagggctaaaatctgggtgttagcatctgttacttctcaaagctgaggtgaagaatccttttcctaatcttttccaggttctaggagtttcccgcatgcatttgctcatggcctcttcttccatcttcaaaggcacctgcttagcatctttaaattcatctccctatctctccctctttcttgctctcactcttttttactctcactcttgcttttgctttctctttctctctgacttctgcttctgtggttacatagccttccctgactcccaccctcttttccttataagaacccttgtgactacaatagtgccactaggataattcaggataattttcccatttcatctcaagatcctgtacttaatcacatctgtaaagtcttttttttttcatataattcaacatattcacaggttccagggattataaagggaatactttgagggaagagggattgctctgtctaccattgtcagtatatctgcatttttattacagcttgtatttaattatgtatgtgtacatactgaatgggagaaaaagcacctcagtattctaatttcagattgtagcacagtccctacacacattaaaataacttattactaaattccataagccttactaaagactttaaagtaaagttcctcatgctccaaaataaacatagatcctggttttgtattatcagcatagataaatctcactttatttttatgaacacatttttattatggaatataaaaccaagagagacaagaacataagcttaaacttgcaacataatgaatattttttaaaatgaataaccacataaccactgcacaaggcaagaatagaacccagcactctagaatcctttgtgtgccacttccagggtaaaaccgttagacataaccacttttctatcttctgagaatcattttcttgataacatttatcacttatacatagatccttaaacaatataatcatacgtgtttttataatataaatcaattcattttacctatattatgacagttattttctttgctcaaattatattttaagatccatctatctttttgtatgtgactttggattatttcaatttttatacaacattccattgctttaatttattatgcaatcattttagtaacagtaagctacagtacaaacaaatagtaagatacaatgataatactaacaatgaagaaaacattcagaattgattagaatatgctgtggcaacaatctccaaactccttgacttgtctctctacacatacctcactagtctactcaacatggagtttacactaacactcggaagtagcagccatatctgggatattgacatgttctgtggcaaagggaatgagcacatgggctgatcgtgttctgtcttttaaagcttctgccacaaactgacacagttcacgtccactcctaattcattagccactgtaagtcacatgcccatatctgatttcaaggaggcagaggagtaccaaatgggaaaagacctgtaaatatatggcaaattgcactgaccagttcaacaactgtggtattaattagtcatcacatattcaatccactgtcctttttgcccacaaaaggcactcaccctccatgatggagtcaatccaaaaaagatctcatagaattattctcaaagtgcaagataccagaatgatgtgcagtattttcatcatcagtgcataatgcacagttgttgctgcctcgaccctgatctggaaactcatgaaattaaaaaggtattaacttacccacatccccatcccttacccaaccaactttcactggaggaataggaacaggatacccatagagaaaacaatccatcagaaaggggagaaagttgagatctcactggtacatattgatgctgaagtaacactgggtagatggttgtggatattccaaatcttaatggtgcagtatattccttgatcagacctcatttctggttcctttgaatttctccctagccctggtctctgtggcccttatcttcacactttgggtggcacttcctctctttttttttttttttttcccctgagatgatgtctcgctctgtcacccaggctggagtgcaatggtgcaatcttggctcactgcaacctccgcctcccgggtccaggagattctcctgcgtcagcctcctgagtagctgggattacaagtgcacgccaccatgcctggctaattttttttgtatctttagtaaagacagggtttcaccatgttggttaggctggtcttgaactcctgacctcgtgatctgcgcacctcggcctcccaaagtgctgggtctacaggcatgagccactgtgcctggccagcactgctcttctatttgcttcttaactacctcagaagaagacagtggagaccaggagtgtaggccttcatgggttctgggtggctttgtaggattggtttttgtctataggagttaaagagcctaatggtccattaaactctgaatatctacagacactttagtcctggataatgctttcttttacaaaataaagtgtcctaaaactgtctatcattttcattaaaactttttaatgtgctaatagaaaatgagatatagtctttagatttaccatattttttgttttttaatttttcatttcacttacttccagttgaattatggttatattgcagcctttttttttttttttcctgagttatggtctcactctgtttcccagactggaatgcggtggtgcagtgatcacaactcgctgcagtctcaagctcctgggctcaagggatcctcccacctcagcctcctcagcagctggagctacagccacgtgccaccacacctggctatttttttatttttatttttttgtacagacatggtctcactatgttatccagactggtttaaaacttctgaactcgctgggcgcggcggctcacgcctgtaatcccagcactttgggaggccgaggcgggcagatcacgaggtcaggagatcaagaccaatcctggctaacacggtgaaaccccgtctctactaaaaatacaaaaaaaaaaaaaaaaattagctgggcgtggtgccgggcacctgtagtcccagctactctggaggctgaggcaggagaatggtgtgaaccagggaggcggagtttgcagtgagccaagattgcgccactgcactccagtctgggctacagagtgagactccatctcaaaaaaaaaaaaaaaaaaacttctgaactcaatcagtcctccactctggcctcccaaaatgctgggactacaagcatgagccaccataccttgccagttgtatttcatttttgtgcctttagtgagagagccacaagttaagtcccttttatcttgtggcatattgctcagtagaaaggattcggtaggtgccaaataatattattcgagtttttgctctgaaacacctcgatagaactgaagttacttaacagtgaatgtgacagtcttagcatttattttatccctgcttcaagtctgagttcaattgttcttgtcactcgaagctcttctcagttttatatgccgttggccttgattagcggttgcatcttctaaccatgacagtccttggaatgcttgtactctcactatctccactatttccgtgtcctaactcactgttttctgatctgatctgtttcttgtgacagtttgccaaattcaactcctaggaaccaacctgtgcttttttcaaccttttccactgggactccaagttcattaagtatatacatttttcttccaagttattacaggtggcaattgtacctaatagttcagaacatgtgtcatggattccatgttcccagcccttcctaggagtttccttgccttaaagtccacagatcctaagtcagtgtcccatgtatttaaaaaaaattgttatgacatcatttgacttctagttaccaatttctggtgtgatggaccatgttatcctgcagttacaaacaattttgaaggcttagtgacttacaagaattgtttatttatcgctctgtttatatatccatcatgggttacctggggcctttctctttctttacatctggacccagactatttgaacagacacttatctgcaacattaggggtcactctggtgaaggaaaataaaggaaatggagactcctcactattctttaccattttcttctgatacagtttgctaccatttgcatgtaaatagctagaggaagtcatatagccataactaactttaagggtgaaggggaatacgattcagccatgtatccagaagggaaaacaaccagaaacactggtgagcaacactatagaacaccacaaatgataacagcattgaaaaatctttctgatggatttatctaaatatgggatacccacatgctaaattgtactctactcaatttatctcttttttttttttttggagacggagtctcattctgtcactcatgctggagtgcagtggtgcgatctccactcactgcaacctccacctcctgggttcaagcaattctcctgccttagcctctggagtagctgggattataggtgcaggccaccacgcctgttttttgtttttttttttatttttagtagagatggggtttcaccgttctgcccaggctggtctcgaactcctgagctcagacagtctgcccgcctcagtccctcaaagtgctaggattacaagcatgagcccggcccattttatctctttctaattctctttctacaaaagacgacatgcaatgaaatccttccggttgcagacaccatgcaaagcaaagggaaagttaaacaactgttcctcaaaagaaattttgaatgttaatagtaaataattgattttttttttttggtttaaggacaaaaaagctataatttttaagaattgttattactgccaagagttaatactggcgagtgccactttatgacttagagttgcttggtttctggttacaatttttagtagaggcaggtttcaccatgttggccaggctgttcagggactcctggcctcaaggatccacccacctcagactcccaaagtgctgggattacaggtgtgagccactgcgcccagccacaattaataaagtttgtttgaacatattataaaatgtgtttaacacatggtgccgatattgtcaaaattaaaaattagaaaaatacactgccattattatactaaaatatgactgcttatgtcagaatatcatacaaagttctgttacttaaaagaaattatttacaaattagaacttttccaagaagtatgtatttacatattgtggcatttcacaatacagcacacttaaaaataattgatacttaaacatgttcctataaagtattctaaatcaggtgagagacttcaatatgatttataaaaaatgttggccgggtgtagcattcaatatgatttataaaaaatgttggccgggtgctgtggctcacgcctgtaatcccagcactttgggaggctgaggcaggcggatcacctgaggtgaccaacatggagaaaccctgtctctactaaaaatacaaaactagctgggcatggtggtggatgcctgtaatcccagttacttgggaggctaagacaggagaatcgcttgaaccgaggaggcagaggttgcagtgagccgagatcgtgccattgcactcaagcctaggcaagaagagcgaaactccattaaaaaaaatgttgaaagtgtaagagtgatttttttttagttgcttccaaatccagaggatatcttttgaaagcagtcgtcacttcattttttttttctgtgttgtgattcttctttgtgttccttgtatgacttttgtcctttccataatgagtgtaggatattagcaggaaggtgacactggatttgtgttgatggacttggggagaacctttgtaacggtgtttcattagactcagttcaccccagataccagcttattaccatctcctctagcatttatatctgaggaacagagaaactcatgtcttttgtcctaccttttgtcctatttccaagctctgatcagggcatatcaaaaagcaatttctggcttgtgctagttccttatcttgggaacagctgcagttcacattccctaagtgtgagcaagcacagatgtcttcactgattgtaaggctgaaggtggaagaaaaacgtccttactagtatgccttgatctgccccagacgttccaatctctccagttcattctgcaaaccagcattgcagtactttttaaaccttggtgtgatagtaaaaacaagacaaagccaggggtttcagagacagatagatgtgtttgacctgtcgtttctccacatcattttcattatctgtaaattgaagatgattacagtagtcgtagttccccaatcttaagctacatctctagtgtatttatttgcctactacacagtaggaatcaatgataactggaagagttgactggtatttccctctccatattgtgaactacatgaatataagggatgcatctttttttaacattattgccatcctctcacatctccagcaatattgtaaacagacagcgacccatatatacctccattatgctctaacaggtaactgattttagcagtgacatatttataataaataattagtgtattttgatttgaaaaatagacttaataattaaaactgagttttatagctaaacattctgataccaaaatagatatatatattttttgcttcaatatacgactgacactttctttgacactgtggaagccaacttaggtaaggtaaggtaaaataaccctttaatgtagtcattgaagtaattttttgtcatacatattcatcattttgttcaggttatggtattttaatgataaataatagttatataatgcagtcaggtgaatggtggtcaccccagaagatatggccacatctggattccctgaacctgtgaataaaagttttcttactttgaaaaaggatcttcgcttatgtaatttaacatcttgatatgtagagagaatcccggattctctgggtgggctctaaattcagacaagtgtctttataagaaaaaggcagagggggatttgagacagacagaagtgaaggaggcagtggaactacagagacagagctggagtgaggcagccacaaatcaaggcttggcgaaggccaccagaagctgtaagaggcaaagaacagattcacccctaaagcttcagagggaatgtgtccctgctaaaatttggacttccagcctgaagagctgtgagaaaatacatttttgttgttttaagccatcaggtttgtggtaatttagtttgaaatcttcagaaaatgaatacagatgtgttaatgtctctagttcttggcatctgtttctgaagattaagcacgacttttcacaaacaaccttgatgcattttgttttctttatagaatacaaggagaaaattaatatacaaactaaccaggaaaaacatctaattgtaacagtctatagatattttatctcgctttctgtctgttcacatgtgatgtaggataaatattcaggtagttttttaattcacatttttggaatttttacattctaaggggaagattaaattgtttgaaaatatgtgtgcagaagtatataaaataaatatataaaaatggctatgcatatgtacatacacatacttatgtgaaaatattttaaacatcaatgtatgaatagttctatgtgtgaaaaatacttaataccattatttattaaactcaattccttaattattaaaatttactcctttattaaaaataaatctaaaatattcacaagttcacgtcttacacatatttgccttgttggaaatattctggtaatttctatgataagaaaacattcatcatgaacaattgtataatttgctcactaatgatgatggtgtctccaagaatttaggacatcaaattgtcatggtgggttctaagatttatccagagtttctgtttcaagagtattttttatggctagaataagttttcaggttactctttagaaagtgattaaaataaaattaagatccatttttaagtcattacaattggtatcatgttattgctttgtattaattgtatacaccatagagtaataagtataaggaacaagacagcttgaaaaataagtgacactggaaatttaaacacagtttggtgggatataaagacaaataattgcatccttctaggcattgaagctaaacatttctattttggtaatgttggctagagcatctgaaaatgcacatcagggtctctgggcagagcaaacacttcctgtaagccataccttcaataaataattcttggtgaaaataaaaccattagcagaaataatgataatcttttccttttgggctttaataaatcatcctaccgatgctaacaaatgaagtatattataaaatatgaaataaatataaatcttaaaaatcatctgagattgccatttctccagtctaagcctcatcagctatttctcttagtaggaccaccagggtccagaatctcataccctgatttacagctgttattttattcagaagtgctcatgaagagcttattctttggttttctcttctgtcacttttgttcagaccaccatgaagaaagtcctggaaaatcactttatttttcaacaatttaatatgttacaattcctgaatctgcatgctacttttcaaaaatgaacactagtgaaatttgaggagtcaaattaattcattgataaaaatctctgaacattgctatgaggccagagtgtagcagttactctaagaaggcttacagtgtgcagaaacaacagagaaaaggtaatttcttaaattaaccctgatttaacatgtaccctgctgtgaaggactctatattttaaaaatgggctatttatctatggtccaggaggcaaagactctccattcaggaagcagtagtatcctaaacaatacataccttcccagcattgtacatttttgtaaccttgatttttctatcatgataaaattagaagacataacacttcataatttcaaaacgtataacacttttgtaaaaatggttttcaagtttttcgctagaaattttgtaaagttgctacaggtacgtgtaaacaaacttgatatgatgaaacaacaaacttctccttatttccttagattgttcttctatcaggaggcacatatttgttgtctggtgtctcctttaatgatgttagcagctattgatgatctttgctagatccattaattcactggcagttggaaatggttctgttttaatgccacaattcttttctcatttattagcagatatttttataaaaaatcctcttatcaatgatatggttaccagtgataccagaaaggcagaataaatgttggatttttcctatcaattactatattctaaaataaagttttgcattcctcacacctttattagtaattagtagttttaataaacataattattgacagttagatatgagagcatatttgatagatttcattccactcaagatggtctcattcgtgctcaaattttctcctcctttactcatggaaggctcttaaatttagcaaagttcttttgacactgctctggtagtcttttggagagcctccacactatctggcatgacaaggtgtcccaggcctaggctgtatatctactgccctggaccaggaatcaggcatttgtctgaagtgaactgattaactgattacttttagtgggaaattgtatctgaacaccataaattgggttcaaggtatgctcattagtactgtattgatctttgcttccagacattttagaaagcagagccagaaaaataatagatacatgaaagatgatagatagagataaatggatgaaataagtagaaagttcatctgagtgttttaattcaaattcagcctttaagggatttttgcataatcggtcatgttacatcttgatctcctttcttctggtttataacactgggaataattaaagtaacatttgctttattccatgatgcacataaagcattctcagttagcaatagcgaaaacaactaatatgaatactataaacatttgtgacttttttgggtagtttttcctgtccatagagtatatcttgctgtaaaaatacagtcaaattactgtgactgaaaggcacttggatagtttatgtttgtgcacatgtgcatatttaataactacaaatatatgtttaacttcactttttaaattatttgaccgtttttttttatgtttttttttttttttttttgagatagagtctcaccctgtcgtccaggctggagtgcagtggcgcaatctcggctcactgcaagctccgccttctgggttcacgccattctcctgcctcagactccggagtagctgggactacaggcgtccgccaccaggcctggctaatttttttgtatttttgaaagagacggggtttcaccatgttagccaggatggtcttgatctcctgacctcgtgatccgcccgcctaggcctcccaaagtgctgggattacaggcgtgagccactgcgcccagccttgaccattatttttattgtaattatgtaaaatgttttttgtggtttctgggtcaaaaagcaaagtgcatataataaagttgtatattaacacacatctgtattatatgcacttttattttttcccttatagtacatggttataaaaaccataattaaatgtaaagtattcctcattcattcattttcagagctatgatttttgtaggtgtagcgtattttattaaactgtatttttgtagacagcaattttggttgttattagatttcgagggatctccctctatcttatagaatgtcacaattattagccctggtcatacatctttataaaaatatttttgccgttgtccatttttgttatattcaaagaagttatactgcttggtcgaagggtaatgattaagttatttggtcacacataccaagttactgttcatcgggattttaacatttttttgtctcactgcaaaggtgtgaaggttcctatttagccaacccctgcttagcagactatgtggttaggcttttgggtttttttccattggaagatgtgagaaaatggtatttttgtttctttattattttcatttcattttatatgaagtgtgtgtcaacgcatctatttttatagggttattgaaaattttatctattttaggtgttctttattaaacatattaactctgattcttcagttttgatttgttttagcttgactgtttacttgtggtgtcctttgccctgtgaatttttaatgtaatcaaatgtacctaatttctcattgcgtctggattttgagttacagttttaaaaggttttccctctcccacttgtagaaaagttgaccagattttcctctgtgtatagttttatactttcacatttcagtctggtccttttggaatttaccctgatgcacaatatgatgaattcacccaattttatctttttaatattgtatctttttatttaagtatttttttccctcactgttctactatgctgtttttctattttggcgccttggtttttccatctcttcatgcaccaaaaacgcattatttaaaatatgtttggtgtcttgtaggccttttctcctttttgctcattttttttttaggaagttttttttttttttttccagcagttatttgtatttatttgttttttaagataactttctactcatattcttgcaattcaggggaaataagaattgtgatcatattggcattgctgtcaatcctgaaattagttagtagaaaactcaatgtgttatttgtttcacaacgttttttgtctattttcatacctttcatcttttaaaaaatcccaagttaaattgtgtattatgtaccaacatcatacaattaaaaatcaaccttttggctgggcacggtgactcacacctgtaatcccagcactttgggaggccgaggtgggcggatcatgaggtcaggaaattgagaccatcctggctaacatggtgaaaccccatctccactaaaaatataaaaaattagccaggtgtggtggtgcatgcctgtaatccctgctactcaggaggctgagaccagaaaattgcttgaacccaggaggtggagattgcagtgagccaagattgtgccactgcactccagggagacagagcaagactccatctcaaaaagaaaaaaaaaaaaatcaacatttcaaattacaaaacaaaatgataaaatggcattcaaaataacttaaaagataatatccttgccaaattagttcaagattatacactccaaaccaaaatcattgctgagagaaagccaatgaaattcagatacatggagagacacatggtgatcatagatcagaagaatcaacatatgtcaaggtctcaatttcctaaaatcgatctacacatttcattcaatcgaaatgtctgtctttttttttcttaaagttaatatttccattcttttgacatctttgaattccccttgaaatacaagagaaatcctcaccactttaagtcaaacacctctgttcccaaatatctgacacatcttccttcatttatttcttctttcttccacttacattcatagatttaactacagacaaagcaagactaggaaatctagtcttgctagatgcatcttgtttaatgaaatgcttaagaaatggaatataggaaaatgtagagaaacaaaggcataaaagcatgtcaacactagtacaactgatctttgaaatgtcaggggtcgccgtgttgtgaaaagcaaattaatataggacgctgaaagaaataatgatcatgaagaatttaaaaatgttactggcactgatatgaatattcttcaagcaatattactttatactaaaatgaatccctaatagagattcaagttgatatccactgcaggttgctacatcaaagcattttatttttttgattactccaccaaatttttcatggtttcttaccatttaaaaacaagaaaacctctgacaataatgaaacaacaatagagtgaagggttttgaagcccatgctaatatgaattacaaattatttttataatagattcattcactataacaagaaaaacaacaaaaacaaaaatattttaaattgtgcttacttgcttttgattatgcataatgtccttcaccgtcttgagcattacttagatgttttaaaattgaatagctaatttgaaattgagtataaaccaagaacaacttactgcaatttatgtgtcaccacaatgatgataacaatcttcataaaaattcttttgtccatcaaagtatgcaatatgtcttataacaaattaaatgttgatcaaaacattacagataaataggcatactttttatataataaaacctttagttccttgctgttctgcaaaatttttaagtagtctataaatctgtatgttacaaacaataaaatgaagccaaaaagaagtgggtaagaggattattgcaaaaggaagctatggatagtatagtataaccaacacaagagaaggtataaattaaagatgtattcagaagagatttagaatacccagtatgcatggtacaattcaggacactgagtacaaaacgataaataaataagatgattatttataatccatggatttaatagtcttatagggaagatagtaactcaggtagagtgtgatagatttaacaatactactgtacttaaggagcttggtaaaatattgacgattgtgatttaatttgcccgaaggaagaagaaaggccaggaagccttcacagaagagctggcacatagacagcaaaaatggcaatgtctttaaatagcagttctgcctggaaacttttgcaacagagaaacacgttttttgacagtttttacaagtaacaatggctaaagtgagaatatgaatttaataatttctatcacaatatgccattgtaaaaattttaaaaggtaagattttagaatatgtgattatataaaatacttataatattggttactgagtaaaatattttaaaatattatagttcatacaaatacactttaagaaaatacactatttccattggtgttatcacagccttagtttttattttatatccagggttttttgttttgttttgttttttcatggattataaaatgttatagagggaaaattgtctttctgacatgaattttgatctgattcttctgatcatatgtttaggtcttctacagtgatacttaaataatctatagggactgaaattacttgggtgtactaggcagcattttccagagaaacagaaccaatatatactcaatagaatatatatgtgtatgtgtgtgtgtatatgtgattatataaaatacttacaggatatatatatgtatatatatatatatatggattatataaaatacgtgtatgtgtgtgtgtgtttttcctttactcagagccatttaacgtattaaagaacagctttaaaaaaaacttaaattcacagtttcttaacagcaatacatttaataccttcgcaagatttcaagtgaaaaacatacattattcatgctacgggttttaaattttccttggataacaccaaaaacatggtactcaaactgcatgttttaacatgaggaacatgaactatcattttgacacaaagacaggttaaacaaaataaaggcaatgtggaactactccagtaccagtggacttgctgaaatctcgcgccctgtcccactccggaactcataccgctgccttctactccggaactcagaccgctgccttctactccggaactcagaccgctgccttctactccagcaccagtggacttcctgaaatctcgcgccctgtcccactccggaactcatacggctgccttctactccggaactgataccctttgccttctactccggaactcataccctttgccttctaagccagcactagtggacttcctgaaatctcgcgccctgtcccacaccggagctggtaccgctgccttctacttcagcacatggaactctgcctccgcagttcttagtccgtacccggcatttcaacaaaaatgtaaatattcagagatgtgtcactgaatgagaattactacaacatgctaaaaaaaagacaatttatttgttgaatgttgaaagaaggggctagaatcagttgaaatttagagtagaaggaaaattttggagtgactcagtcacttcactctgatttcatttaattttttattttttgagacagggtcttgccctgtcccctaggctggagtgccgtggtatactcatgactcactgtagcctcaatatacatacactaatatatatatacactaataatgcagccacagtatacatacatgccgtggtatactcatgactcactgcagcctcagtatacatacactgtatatatatgtatatatacatacactaataagtatcaacagatatatatttaataaatttatatatatacacactagcgcatatgcacacatacatcaaaaacatacatattatatactatatataatatatagtaatataaaagcgtacatgtttttgatgtgtgtgcatatgcactggtgtgtatatatataaatttattgaatatatatatctgttgatatgtttataaaataccctatttatataggatatttaaattaggataatttttcattctctatataatatataggataataataggatgaataacatataggatatatataaagtgaaaagccagtgctgtgattccagtctgaatctgaagacctgagaaccgggggcactgagggcaggataagatggatgttccagctcaggcattgaggcagagagagtgccaatcctaccttcctcccattttctcctattcaggctctcaatgtatcctatgctgttcagccacattgggaagggccatgtgctttatttactcagcacaccaattcaaatgctaatctttttaagaaacaactgtataaacatactcagaaattatgtttgatcagatatctgggcagcctgtgttcagtcaagttaacacataaaattaatcatcacagaggatgtgtacttaattattttgacctcataaatgaaggctttctctaactttaatactgtggaacaagcagggatacacagcatgcctaagcaaaaatgcaaataactggtgatagtttctactggaagatacttcacaggtaggggcacgtctctttgactgctttgtcatcaaacagcctctctggaaaaatttatttgtccttgtagggagaagaagatactgttaaagtggagattttaaaataaacctaaagtgtgcagatatacagtgttcaacaccaaaaaccttaagaacagacatcttcattttaaattttcctttagaatcttcaaaagtagataagaatcctaggcctgaagctttttttgagagacgcttttttaggaactgcagtaagaagtattcataagtacttaagttgtcatagttattaatagttctgagaatttcccttagatttcccagtatattcagttgatgttcaaatctttgcagagaagttgacctgaaggagaattaggaaattaacagaattagaaaataattataatctgggaattattcttacagtagaaatagtgtcagtctaaagttgtatatctcataccatatttactaaaattatttattttgctggtaaggcatgcataagccacagtgtatttccaaaagaatatccagctctttcaatgacgattactaatgtcccttttcaaatttaatgattataggaccttagttcaaataaaaatactgtatatatgtggttctatttctggactctgttatgttccatgaatctgtatttctatcattattccagcactaaattgtctggatatctgtaagtttgtataaaatcttgaaataaggtaatgcacactgtctttgttctttattggaaaaatattttggctatttgaggtcttccttttccatataaatttaaaaccttcttggcaattttctcaaaaaaagtctgcagttcatttttggagaattacattgaatctataggtcaacttggagataattgatatattagtaatatagatttttccaattcaaggtcatggaatatttctcaatttatttagatctcttttaacttcaggaactttgtctactttttgattttttattttaccttaagttctgggatacatgtgcagaatgtgcaggtttgttacataggtatacatgtgccttggtggtttgctgcacgtatcaacccatcatctaggttttaagccctgcatgcattaggtatttatcctaatgctctccctccccttgccccccaccccccgacagggcccggtgtgtgctgtttccctccctgtgcccatgtgttctcatttttcaactcccacttatcagtgagcacgtgtggtgtttggttttgttcctgtgttagtttgctgaaaatgatggcttccagcttcatccatgtccttacaaaggacatgatctcattattttttatggctgcatagtattacatggtgtatatgtgccacattttctttatcctgtctatcattgatggggcatttgagttggttccaagtctttgctattgtaaataatgtttcaataaacatacatgtgcctgtttctttatagtagaatgatttataatcctttgggtatatagcccgtaatgggattgctggatcaaatggtgtttctagttctagatcctttaggaattgccacactattttccacaacggttgaactaatttacagtcccaccaacagtgtaaaagcgtccctatttctccacagccttctacttttatgtgtttaggttccttatatattatgtgaaatttttttctaaatattttgtgtttttattactgtaaatggtattgtgtttatagcaaaggtatttttctttgtggatatagaaatacaattaattattgcatgttgagcagtaccttgcaaatatatttacttattcttatagttttttaaaatgtaatttctgtgagttgcttacaaattatttgtgaattagttttacttcttgccaagatttatacttttttctttgttttcttgcctagtctgctgcctagggattccagaaaaattgtgaatagaggtgatgagaacagatatccttgtcttgttcctgatttcagggagaaaatatgcaaattttcactatcaaatatgaggttaaatgtagacttttaaaagagattcttgatcagattgaggaaatgttcttatattcctagtttgctattttattattaattgatgttgaattttgtcagattttggaggcatctatctttatgatcatatggtttttatcttttattttatatatgtgataacttccattgtttgatttccattcttgggataaatccagcttcatcatgatattgtctgtggtatatattgttagatccatttttcttatattttcttttggatttctgtgtctatattagtgatggtattgttttctggtaatatatttttctgcatttggtataaagataatgatatttttataaaattaattgggaagtgttctctgttgattttaattgggaagtgctctctgttgattttatgaaaaagtttatagaagctggatgctattttttcttaaatggttgacaaaatttatgggctatgtcatcttggctaacttttttttgtgggaagattttaaaaatatatatatatttttaatcgtgatatgtttgattgataccattcttgtgtcagttttggtgggttttgtctttcaaggagattaggatgattaaatttatatttttattttccagtgttatttaaatcaattaaaaaaacacttctgtatctggcaatttagatatatttttattacctattttgaatgtgattccttaggtttagataatataatctggaggatttagtcatattacactttagacttaattatgttccagaatattaagtatcttagataatatttaatgtgtattttttatcattatacttcaaattgtaaggtacatgtgcacaacgtgcatgtttgttacaacatgtgccatgttggtgtgctgcacctcatttaatgtgtgtttgaaaagactattcagtagttgttggttgtagtgtattattaatggttattaggtaaagtttgctaataggctaattcacatcttctaaattctgacctagtttagtctacctgttttactttctcagagtggaatggtatagcctctacctataattgttgattgattcctgttaattctgtcaggatttcctttcagttcttcaggtatttggaagcgctggtagtggcatacacgtacaggatttttatgtctttcttgtgaaatgattcttattatttgaaatgacctccgttatatctaatcatgttgtaataaacttgggtcctgatactaatagagacttcccagccatcatatgattagtgtttgcatgatgtgtttttacatgcttatgtttttaaatctgtttccattcttttcttgtttgcattattcctgatgcactgtcaccattgttcttatttgttcttttgtgcattaagtgacttttttctctagctgctctcaagattttaattcttgatttttagaaatattgttatgatatacctcattataatttctttatgtgtatcctaattagagattattaagtttctttgaatttgtgggtttgtattgcttaataaaatgtggaaattttccactatatatttcttcagtcattttatgccctctcttctggaactctaactccatgtatgttggactggctgacgttttatcacagtcaatgactgatgctttgctcatttatttttttctctccatgtttcagtttggataattttaattgtgatgtcctaaagtttactatttttcttctgttaagcacagccagtgagcatttaatttagattttgtacttatagctttaaagttccgttttattttttcccaatggtttccatttccctttatcctgatttatattttccttcaaatcctcgaatatatatgctaattccattttatttttcatttatatatatttctgtggatatattttctcctgcttgtgggtcacatttccatgaattttcagtagtctactgttttttgttatatgttggtcgtcgtgattatcatattgttgagtttctagacgttggtattttcctttaaagcagattgtattactttgtggcaacaattgaaacatttcagggttaagatgatctgcttaagccctgttttaaagtattttaggctagactttgtggagccagtactctagaagtagcttagttctacttcaccgttttgggttttttggggtctgtattgaatattccagttactcaacaaatcactgtactctgccttaatggaacttggaaatctctcagcaacctgagttctggtagcgttccagtttaccactctccagtagttgttgtttccctctctaagattagcttagtattcaactacagactcaatgggacacttatgctgatgtctggagctccttctatgtagcctcctgttctataataatctgacataaactttagccatcttaactcctgtaaagttgcgtatgtgtcttcatagcacatagaaaccactgtgccattttccccctcagtattgtgtctggtaagtgtctccaggaagaaagtcagggtgatctagtttttcccccttctctcagggattaatattctctactgcctgtttaccagatgtgacagtatttattttttatttctgttttttagttgtttagatgaaagggattgtctggagtcaactataccgtcatggccagccatggaaaattcactattttttttttttttgtaataatgtattagtaattgggtgcctttacaaagctctttcctttacatctggaagacaattccattatcattttgtttgactctttcagatcttagtttaaatgtcattttttttttcatgaagctccctggaatctgcatgtccaaatgtcttctttatatgctgtcagtattctgtgctttctccataagtgaacttacactactatgctgtgtttatttgccccttgccttgtatatatgcataactgaattacacacaacataaatatatagaaatgtataatataatagaaaagtatgaaatattgagtaccataaatgtgcatatttaaatgaacgtttggaggagaaagaaatccattttaagtagtggaaaagcaaacatcatgacttttgtaagacatggttgaatgtgagcattttggaatgggagggagccacattttagtcatggtggggggtaccgtgcgaacaatggaaccaaaatttgcagttttgaaaacatataagtgaatgtttgaatataacttgggtcaaaatgtgaagagtattgaatgatggagctatgatggaaaagtacattcaatctattaaggggttttgcagtaagagactgatgagtttagatcattctgaaagcattttaaaggtagaggaggtagacttaattgggcagcttttaaagtagctaggtcaaagtatgacagccaaataaagtgtgggagagagagaaggggcatgttcaaagtgtattcttaatttttatttttcttggttaaatatatgattaagtttataaatgagatagagaatatgtgataagtgaaaaaaatgttttagagaagaggtcatattatttttagcatgcaaatttggagatgcctgctgcatgttcatgtatattgtctgtttggcacttaaattatgggtttccacgatatatggggatagaataacaagttagataacatcataaagaaacaatcagccaaatccatatgggggattacatagataaaatgacttattttatctagcatatcaattatatgaggaaagaaacattgttatggaataaaaagttttatgagctttggtaaagaatgcagtatgtgaaatttctttaatcatgatatgcacaaaccaactataaatatgttttggaagcatttagggaaatggaatatggatagcatagtatatgctattaaagaaggattttaacttaattagttgtgaggatttcatagtggttccattagaaaagagttttatattagttaaagatgcataatgaacttatagataaaatgatatggtatctcatattttctttaaaatactgtagcaaagaacaataaaggaaagacacaaaacgaaaacgacaacattttgattattcttgaaacatgagtggataggtacatggaaatgctttctgctacacttttcttcatctgtgtatatttgccatttctgtgacattaaaaatagagtctgcccagaaaactcttagatatgtatatagatttaagctaaatatttgtgtgtatgtttatatgcatgtgtaggatactctgagttacaaattgtcttaaataccattagaatagggtataaaaatagaaggtcaaaaccagacatcttggagccagcaatagttgaggttgttggaaaaatattagacatacaagaagccgtaccaccatctggaaaagtagtagtggcagggagtgggcttttgctatggtaatgaaaattaaaattatgaagaaaggcaagatgcaagatgcagcattgtcttggtaaaatccaaaaagtggcaacagtttcatattgagaggaaaaaacaggggtaaatgcagtattgcaaacaagattttgtacttggctgaacaggaaggataaatggtaatgccatcaaccaaaataacagacagagaaagaagtgtaggctggggaggaactatgatggatattggtcttattgtaagatactacactaaagaaaaggcacttcagaaaatgtttgccatgtgagccctcacaaaggtgagtggcaacccattatcttttcatacactctgaaattttgagtctgcttaattccactattgaaatgttttggtttaaatatgtttaaaaattgtattcctgtaaattttctcattttaatagcagctcattacaatgttaaaattatttatatatgtgtcaaagtcttgtgggtattccattctttctttttccttttatttaaacttaatacttgacactctggttttgtgttagttactcatgattattcatcacatcactatgactagcatagtacttgttactctttttatataaaatgttcaattcttggttaaataaatggcttattaatgttataatgtaatcttggagttaacattggctttagtatatggtatgagctcccttttcaaaataatatctttaaattgataatgtaatagaaactatggttatatacagcgtatacacaagagtttcagataatttaaacataatttgtgtaattgcagcacaatttagtttgactgtatttttacaaattaaatgagatactgattctactctatacaaccatgggagcaagtttttcaaaataagtttttaaaaaatattttcattgcctgtgaagatgcagaaaatactagcagatactttgggaaaaaccccttaaaatagtctaaaaccagttaatctgtaattaatttaatttggcatgtggaaccactatcataccccttcattttcatctatgtggaaggttcttcttacttcagttaagtgttcactggtgagtttgtagtagtcatactgtctgcttcctgcccttgactcagtatctggaaaagattcagagataatcctaatccatattcaatctccaccagttctctaaggcactcatatacaagaatgtcaaaataaaagaagacttgctactgtagcatgcttgttctgtagtatttctgtctcattataaagaatgaagcattttttgtttctgtttagcaacataaacaaacaaaaataaagtgaattccacattattcatctttgaactccaaaggagtaaatttattttggacacattcaaacactgttgatgagacagtaatatattcaagaagaacaacaatgttttgccatcaaatcattcataataaatgtttgccctacctatttagtctgggtatgcagagtatataggacaatacaaatacagtatacctagtcagaaaaaaaataattgcttgataatcctatgaaagttatgttagtcttttgtttgcatggatatagtaaacaccaaagtttttactatggaagtcaagtgtaaatagatagattatagatagatagatagatagatagatagatagatagataattgtagatatagctttagttatatgtatcatattcccagtatggtattctttaatgatattttttagaaacaacagagaaaatgacttgagagtaactgaacttcataaggtaatttcttccagaaaccagaatcataattatgtacagagctatggatataaacctaaacataaagttacaattacatgtgtaatgtatctcgcaacaaagaccatataggaaatatgatccaggcttgactaaaaagatgacatgtgttctaataaaggcttaatatcttcttattcattaactttcacctctcttttctccctcactgaactaatagctcttctttgtacaaaatcccaattattattggtaaaaatttcaagtttctgcacccgcaggttttcaattcattgcagagcagcagctgtattcctacagatttttttttcacttttttctaatagactgtgtaagatgcctgccacgtgttccttatccccaagggtgactacactatttgtctgtggactcatggctgtatctttcactcaactaatatgttactcattgttgggttaatagaaaggaattatatatttccctgaattttggcaagaagagcaattcactacttgaacccgagctaaaataaacttccacatttggtataaaaatgaacactttgctgtgctctaggcaatacctttgaacatttttccttggctgctgcacatggcgttatagtcttaactatatttggcacatgatattatagattacagtcactctatgcattaatgaaaattcggcttttgtatttttacagattattttggaagccgattagttggtagttttgaagataccatatagggttatgatcaaaaagcaattacatatataaaattttagaaagtaatcatatatcatcatctttgtacattgtcaaataaatgaaggggaggaattaatttaattacactttgtaatgtgttccctcttataaaatctccagagtgagattttcctttatatggaatcatctgcatttaaaaaaaaacttcgtaaaacatgcaaagagcagctgcctatatttgcagctgcaagacagacatttttactacacagtttctgcttgaaccatgacaggtgaagtttaaaaggattcattctaggcaaagtggttagtctttaaaaagttttgttgttgttgttcttgttttatttctagcccaatcaagcatcctttttggaaagttctttctccagtttcagaaatgtagagcctagttatgcttctcattcctcctaatacaaaagatgtttgtatttaatatgagggaaccaagtaggtgaaagattctggactctgaagtcagcctgggcctgaacctcacttctgaaacttattagccgtgtaatcttcggaaatttaaatgtttctccctatgtttgcttattctgaaatagttgttgaactgcagaaggcatacgtatagaatactggcaaaactaccctcttaagaattaaacaaaataattttaaaaagacagactatggaatatagtgtgtactgaatgtaatttagattctcttctatgttaatctgattaattatattttaaaatagcacattcacactgttttacttgaatacagctaaatgtgtgtatatatggaccacatatacaaatatggtcccttaagattataatggggccaggcgcagtggctcaggcctgtaatcccagccctttgggagaccaaggtgggcagatcatgaggtcaagtaatcaagaccatcctggccagcatggtgaaatcccgtctctactaaaaatacaaaaattagctgggcgttgtggcacgtgcctgtagtcccagctacttgggaggcaggagaatcgcttgaacccaagaggtggaggttgcagtaggctgagatcgcaccactgctttccagcctggcgacagagtgagacaccgtccccgcccccgcaaaaaaaaaaaaagattatcatggttctgaaatatttatatcacttagtgacaaagtagccattgtaacaccttagcatatcgcattactcacctgtttatgatgacgctgatgtaaacaaacctactgggctgccagtcatagaaaaatatagcacatatgtttatatatagtacatagtctttgaagatgataataaatgactatatctggcttatctagttattactgtatgctttttacagttattttagagtgtattccttctatttataaaagagaaaacgtaactattaaagagcctcaaacaagttcatcaggaggtattccaaaagcagaccttgttatcataggagaggatagctccatgatgttattgcccctgaagacccttcagtggggtaagatgtggaggtggaagacagtgatattgatgatcctctcagtaggcctatgctaatggctaatgtgtgtttgtgtcttagtttttaagaaaaaatcttaagtataaaaggtaaaataaaaaattgaaagtagaaaaatttgtgaggatataaataaaaaatatcttcatatagctgtataatatgtttgtgttgtaagctattattacaaaaagagtcaaattttaaaaaataaaaaagttatatagtaataaattacagtaagctattatttaagaaagaaaaatgtttaaataaatttagtgtagtataagtttaccatgtttataaagtctgcagtaatatacagtcaagtcctagacaatctcattcactcaaaactcactcactgactcactctgaatgaggtcatgtcctgcaagctccatttatggtaattggcctcttcaggtgttcaattgtttatcttttatattccatttttgttggaccttttgtatgtttagatacacaaataattaaccattgtattacagttgcctccagtatttagtatactaacatgctatacgtgtttatagcctaggagcaataagttataccatataggctaggtgtgtagtaggctatgccatctaggtttgtgtaagtccactctgacgttcacacaatgacgaaattgcctatgagtttctcagtaagtttctctgtcattaagcaacacatgatactctctctctccctctctctctgtatatatatgtttttgtgtgtgtatactgtgtgcatatattgtgtatgtgtgtggtattgtttgatttttgtggtttaaacatttataatgtaaaaaaaatgagtatacatatacatgtatatgtgaattatattcaactccaacattggtctgggtgagagatacgtactgggaaagaaagagcccctaaactatagaaatttgttattgcctgagatacggaagacctgagaaaagtcagtttatgctcatcgcgtattcaaatattttgcgccttggtagatctcagttagactcctgaagttttgatttagcatttctcaataacaagtcttttaaatatatgtaccgtgtaaattttctggcagactcaactgttactatattttatttaatttttgcagtataaatattttcagcgtgtggacatcatgtggacaaaaagaccaaaagataatgaatgaatgtttgaaataagcataaacagtagcttacttagtaatgccactgatctatatgcttctataatatataattatctatatacttctttaatataaatatattgttgtagcataaaatacttgttttcaatacattgccattgcaggcaagaattttaccaattagatttctagtgagtatttgtgttgtattacaactaaatatgagaatggctattttattaaagagtaatatttatttattacaaaatatcctaaagtcttacaatattttctaaaatctttaatttgaaaaagcttaaaattaatttaacaaactttaaaagtgaaacaacttagggactatactgcagtctcatatcagtaaaattggatgaatctcatctgtgaaatcatttctttatttcttactatttacatttggaaacttaaattctatgctatagtgttgtgtatgcaagacaatactgagtatggtaaaatttctaggacattgtataaaatgtgaagatacagtaacaatatgactttattaaatggagtatctgcatttcatatacaccatgaaatgtgaaaacaaggacccaatatcataattttgatatgcaatgacattctgctttaattattctatttaattgtttgttcttgactatattatatttgaatgagccctatagcactgaataatgttggagagatttttcatccagtctaaattattgagttcaaatatttcagtatacgtaagatcactccatactgtaacaaagaagtccctgaaatagtgattgagaactttggactattaatgtatgtttaggtttcctgttgctatctagcacacctctgctacaaaatgaaggaataaattgtcctgtgaattaatttaaacaagaaaagttagatccttgaaaaaatttataacacatgaatattatttgcgaatagataggaaaaagatcaataatcttaagacagaatgaagattagggaaaccaatgattatagagaaaaaaagataaaaaattttaagacggaaaaaggactaagttagaaatacaatgtctgtaaggcatttggtgcattttatttatttatttattttatttatttattatttcatgtatttgttcaataaacacgaactgtttactatatgccagatttcagattaagcaattgtgtggtagggttgttttttaatatattcacacctagattgccaaaacgattatttcagatgatagcccactgaagctggacttaacaacaatctcataattgagaattgttgagaaatgtgagggattgcagtgctctcatttgtgtgtgtgtgtgtgtgtatgtgagagagagagagagagagagcaagataacatgtataggatatatatgtgtgtatttaaaaatatttatgcaatatcctgtgtctgtcctattagtgacatatacatgtgatatatccatatatgtatatatatctattagtgttactggaaggaccaatatatatgcaaactccatagagtaattagaagagctagggagctgaaggtgcacttagtacgtaattgataattaacgcagtcgggccaggggaaggctaaatgagcagagatgttgcagtagtcatgtctatgaggacaagaagtaggttattgggtacagtttaggtaattttggaataatttctttcaacgatataatggattgtaaaatagttaaaaatatttcatttcatatttgtttcttattcactctctgcattatagctttcagaaatgaggatttttgacaaaagggattctatactaggatcttattgtgtgtgtcactgaaccatttgataatgtatttagagatacttattactttgttgatattcccatatttaattcacctcatagtacttaaagaaaactttattttgccacatccagttacagaaacaaattcagggaaggatttacttcacacagatatttatctgtaacacacttgaagtgtaattatattttcacaaaataagttctaagatatgatttcaaaaccactttatagaatgaatgacaactctaccggcaagttaagaaaaatatttttcctattaaatacaaaaataaaatgggtcatgagtttgaaaaatatacataaaacataaagatgaatgtttgctgattcaccaggttgtaaattttcatgagcagttgtgcttaaaactttgtttaaataccagtttagcaaattactagcataaaatatatatcacaatttacatatgactgtgggctgttaagagaatggagtatatttggatcagcagaaattctgtatgaaaaagaaaggtcctctcaagttcgtacaatttgtctccacacatttagtgaaaaagtccaaagtgtgcattactatattccagtcttatgtttgacatatgtacttaaatgattgcagccatggaaaagaaaaagaagttcttggtgatgattggcatgtatcatggttcagacaaagacctgtaaaaaaaacctgtcagattacccaaaaccttaggaaacaagtcatcgttatttctaaaagttgccaacatcagcactgatccgaaatatatccgttattggtgaagaaaccggattgatgttttatctgtcaaaagatatcatgaacagtagtttaagtttgccacttagaagaaatttggcagttcctgtgaggagataaaactgcttttatgaataaataaaaaaagggaagtcccaattgcttactcagtccttgtgcttaaaataatgaagagtccaattagcatattctttcatccccttttctaaatactaatgttgaagcaaaaagagatgttcatataatcatgtatttctgtccttggtgtacagcattgaattaatgatgtcaggaatacagactaaggaaatacattcagcaattccactgaagaagcttacagtgcagtaaaaataaagataaatgcattacattcagtgttgacagccaaaatagaggtcggtgattacctgtaggagagagcaggttgaggtacttcaaaggcagtttactgaaagaagggaggctctagagggatgtaggaaggtagaagagagatgaaaagctccagtattatccagagtacagctagtttgtctggccttcttctctgctttgctaaatatgttttaattaatcagcactcttccctcttgaaaacattttcgtttgctttatttttttttgctgaggttattatttattgttagattcaaaacattgaattgccacagtttgtctttgctatgcctgtgttgcttgatataacgtacatgaattaagcattaatgaattagatcttttaagagtagttttctgtacagttaccaacatgacatgataataatagtttcttgtttgtacttttgtttctatttgtttgctgagtgtcaggaaccgttctcagaatttacatgtgttatctatgtaatcattactaaaatgttaaaagagaaatcaccatcatcactgctatttttcagataaacaaattgaagtgagaaaaacttaagtaaatacaaaagtttcacatttagtaaggtgggactgaaatacaatgctatttttttactcccagagtcttgtgttctagctaataattagtacagtgggaccagtttgggttctgatggccccagttttctcctggcccagtctgtctggattagaccaatgcaatggatgagaattaataacgattcctggaatcactgcaagtgtacttggaagtctcaaccaacatcccaggacctagaaaaaaaatctatttatatttagcaagactggacagctgccaccaggtggcactaaattcaattaaaactagatggctgcagtagcatccctgatcatccttggctgggcaaactcagccttatttttgcagtactgtaacttacagaattgaaatatttgcactccaattgtcttgctatgatggaattttctgtatttttatttgacattgaaaaatatcttgaaaatagagtattacaatttcatggatgattacaaatacttttttggaaaaactatagaagtttgaccttttgaaacaaaatgttagatttgcaaagaagttgaaaagccactaattttaaatgtaaggaatgactgaattacctttgcaagatatttgcaaagaagaattgatattgcctgacctttctagtgagtaacataaccccgagagactaactggactacctttggtcagatgacagaagttagcagttatcaaatgagtcaaaatctgtgttttcacaacttttttgtttctctacaaggttctaattttagaaacatcataaaaccaaacgaggcaattacaaattaacttttcttcagattttttaaacctattatgaattttagttaagtttaagttaatttattgcaacttccatgcttgttatttattttttaattgattttcttattgaagaaatgttaattgagtgattactctatgcctggtgttaggggtcaaatagtgaatcaaacagataaaaactttaccaatgtagggtttactctcatgtgaagaaaagacagttcacagataaataaatagagtgactatcaattgtgttagttttatacatgcaacatgtaagggcttaaggtaactataactacaaaaattgattgaatttgtatcatataccaggcactatcttaaatgcactgttgtatttaattctcataacagccttgtttgagttttgttttactccaaaacaatccttggttttggcaattcactagaaaaactcagaggactcagaaagcctgtggtatttatggatactgttcattcagggaaaagatacagatcaaaagggcaaagggaaatggcagatggggcaaatagaagccagacatacatttcttagtgtctctttccagtgtaatgacactaggacacacttaattttcccctaaatgatgaatgacagcacatgcaaagtgctgtccactagagtagttcctctgagcttgggtgtccagaagttttatcagagtcccttacctaagcatttagcaccctctagactgattgagctactcactccagcctccttccagagcaaaaacagatgttcacattaaatcacatggtttatccaactgctactctgaccaaaggcctcaggcatgcaagtactggtggccaacataaatacagtgtggcccagggcctcaagcatacataaccacgcatactcttaccagggagaatattctaaggaataggttgtctctgaaaagtcaaccaattctttctttggaatgtgcagagttggggtaaccgaggcctgctcattttttacctattccacccatctggcccttggcatacactctcttacaataaaactatcatattttcctgagcatttatatttattataacatttatattttaatcacatttatatttaatcacagaacaaatcagtaaaaattacaggtgtattttccctgccttcccaaatgaattggcccttgtacatattcaggatattgttataagtcattacaattcattatctctgggttataagtcatttggggtcaaagcagtctttgtgccttggtcacaggcttgtgctaagattgctataatttaatttgactatgctatgagagctccccataacctttcctgtttaatgatggggccattctctaagggaattgggacccccgctgtgatgcctattgctttattccctgagaaacctattgtatttttcaggtctgcttaatagcttttcaggcaccaaaacaaggcaatacatatttgtacaaagaacacattggcatttagggcatacagcttcctgtttagtacattataacctggagcgcctttaagcatttagtcatcaagacttatattatttatttatttaattttttgagacggagtctcgctctgtcgcccaggctggagtgcagtggcgccatctcagctcactgcaacctccgcctcccaggttcaagcaattctcttgcctcagcctcctgagtagccgggattacaggcgcccaccaccacgcccagataatttttgtatttttagtggagacggggtttcaccatgttggtcaagctggtctcgaacccctgacctcgtgatccatctgcctcagcctcccaaagtgctgggattacaggcgtgagccaccgcgcctggcctggtcatcaagacttatacaatgataagtttcccagaagttgtataccatcatattctctgatgggccatttgcaatagatgtaaccagaacaataagagtcaggagactcttgctagaattgctacaattccactcagtcattaaaagttacttacttttaatattatacattgctagagttccacccagtcattaaaagttattgcagatcatcatcacattgtgtgaccacattgttacgcagaatgatgcctctaggtttaccagatttttatttgaatttgctaggttcaaataaaaccactctcttcctgctacatggattcccaagcagtaatttgtctttcaacatattgcatctctctcaaaaagtttggtggaatagaatctttctggtcagtcacaaaattcagactaaacgccatttcatcaacttatattgataacctgtatacaaatatttaaatattttaccataacctgctgactacccttctctaagtattgctttatctccaaattatgctattagttttgttgttttatgtcccttctctttcttttatgtgattaacctttatgtaaatggctttctagatttttttagttgtgttttgggggtgatctgggaattactactgggtgagtgggtgggaattaaagtgaacgttcttgtgttgtttgcagagaggactgccagttttctctctctctctctcaccctccccttgaaatctattgtgctttattatcagatcgctaaaaattttagccatgattagatgtagattttgaagaaaaaaaggataatccaatatatctgtttacttctatataatggtttactctttggttttagtttgaatagcataaaagagatatttataatatatttttcttaaaattttataagcttgaacttcaggaaacagaaaaaaagagcacagttacctaaagtaagcataataaaacaaatacatcaatgaaatttaaaacaggaaatcaagagagaaaaatcaatgtttaataagattagataagagtactaagattgacaaacttcgttccattcagggttcctcagaaaatagaaaaaagaaacagatgattgatatcaggaatgaaagtggaggcatcactacagatcttatggacattaaaatcataaaggaatattgtaaaaattatctgcttacgaattttataacctacacagaacacaccaattccttgaatgacacaatcttccagaactcacaaaagaaacagattatctgactaggcccttattaaataaattgaatccgtaagtaatacaaaatagagagtgccaatcccatataagttcatgggtgaattataccaaacattgaaggaagtaattacactaattctccataatctctttcaaagtatagaagcagagggaatccatcctaactaattatatatggtcagcattaccctaatactaaattacatgaagatattataagaaaaaaaactacagtccaacatagcgcataaacatagacgcaaaaatcctcaacaaaatattagcaaatagcatccaacaatatataaaaatatttttactttacaaccgagtgggacttactccgggtgtgtaagtctggttcaacatttgaaaatcaatgattacatttcctcatatcagcaggctaaagaaggaaaacacaggatcctagatacagaaaaaaaatctaataaaatccaacacccattcatgataataattctcagcaaacaaacaatagagggtaacttcatcagcttgataaagaacatctaccaaaacctacagctaacaccatacttggtgttaaattagagccttcccattaagattcgggagtaagctcaggataccccttctcattagcgcttttcatcattgtactggaagtccttgctatgcaataaaaaaatagaagaaaggaaaagacatacagactggaaaggaataaataaaactgtctttcttcacagatgacaggggtgtttatttaaaaaatccaaagaatcagcaacagaaacaacaaaagctttctagaattaataagcaattatagcaacgttgaagattataaggttaatgtgtgtcaattactttcttacatattagcaataaccaaataaaatttgaaactaaaacacattactatattaatactttccaaaatgaaatattagagtataaatctaaaaaagtctaagagccatatgaagacaactacaaaactatgatgaatgatatcaaagaagaactaaataaattcagatacattcttagcttacgtgtaggaaatctgaatattgtcaggatgccagttttttccgactttatctatagattcaacataatctcaataaaatcttagcaagttactctgtagctatcaagaaatggatagctaaagttcatgtggagaggcaaaagacccagaatgaccaattcaatattgaagcagaagaacaaagttggaagactccattattagactttaagatttactatctatctgcagtacagacagtgttgttttgagaagaggatacacaaatagatcaatgaaaccgagtagagattccagaagtagacccacatcattatagtcagctgatctttgataaaggagcaaaggtaatatactggaacaaatacagtttttacaacaaatgatatgggagcaactagatatccacttgcaaaaactgaatctagacaacgaccataaatccttcacaaaaattaattcaaaatggatcgatcgtagccctacatataaaatgtaaatctataaaactcatagaaagaagataacaggataagatctacatgaccttgtgcatcataatgacattttaggtacaccaaaggcacaatctgtgaaagaaatatttgataatctggacttcattacaattgaaaattatttctcttgaaagaccctgtcaggagaatgagaagtgaagccacagactgagaaaaaaatatttgcacaagatacatctgataaagaattgttatccaaaatatacaaataactcttaaaattcaacaataagaaaatcaataacttgattaaaaatggtcaaaaccctgaggagacacctcaccaaagaaaatatacagacagccaggcatggtggctcatgccggtaatcccagcactttgggaggctgagactggaggataactggagcccaaaagtttgaaaccagcctgggcaacatggtgaaattcattctctgcaaataaaaaataaaatataaaaagtagcctgatgtggtggtgcacacctttagtcccagctactcaggagtctgaggtgggaggatcgcttgaccccagggaagtcgaggctgcagtgagccaagatcatgccactgcactgaagcctgggtgagagtgagaccccgtctcaaaaaaataaaataaaatatacagacagcaaataagcatatgaaaagatattcaacattatatgtcattagagaattataaattaaaacaatgagataccacagcacccttattatagtggccaaaatccaaaacacttgacaacaaaaagtgctagtgagggtgtggaacaagatgaacattcattcattggtggcgtgaatggaaaatagtacagccactttggaaaactgcttgggactttcttacaaaactaagcatattcttaatatatgatccagcagttttactccttggtattacccatattaattaaaaacttgtggctgcacaaaaacctacgtgtgaacatttatagtgactttatttaggatgtcctgtagattaattagtaaatggtaatacatccagataatggaatattattcagcaccaaaaagaaatgagcagtcaaataatgaaaagtcatggaggaaacttaagtgcatattaccaagtaaagaagccaatctgaaaagactacctacatatgattccaagtatatgagactctagaaaaggcgaaactctggagacagcaaaatgatcagtggtttccagggtttgcaagggaaaggatgaacaaggggaacacagaggctatttagggcagtggaattactctgtttgatacttcagaggctatttagggcagtggaattactctgtttgatacttaagtggtggaaacacatgtcattacatgtttaccaaaatccatggaatatatattctgagtgaaccttaatgtaagccatagactttgcatgttgttgatgtatcaatgtaggttcatcaattgtaacaaatgcatcactgtggcatagggtgttcctagaggggggaaggctgtgcttggtgtggggacagggctatatgggaactctctgcactttcttgtcagctttgctgtgaacttgaaacagctctgaaaaatcacatttattgattgctaaaaaaaaatgttacgagttgtgaacttctgcctttcatttaaagggttttggaaacacttttcagctttaaatttgatattgtaatagattacacagtcaattagacaagggtgtggtaatacatttataatgtgatactttcagccactgttatgattaattgccatgcattaaacattggctgagaaatgacacttgaaaatgatgatgggattattactattaagcaggttctaagctggggtatgacaaggacttgtagcatgttttcttaaggaactattccaaactacaaatgcctatgcagcaatgttcagtaaaagatgaagcatatacaatttagaaaaaaaattagttagaactaaactgtaatgaacactcatgtttgctaggcactgatagtaagaggatttgcatgaataatgttatttaatccttcctttatctctatttggtagggtatattttgtcttggtctgatattgagaaaactgtgaggtactcagaggtaaataaattgctctaagtcacacagaaaatgttgaagtcaggtgtcaaatggtctcgcctctggagtgtaccttgtagcaattttctcatactggttcccactttgctgtgttgtttttcttaaccacccttgactgccacagactggaatagcgagggcactgagttttgaagaaaatatttgatgctaccatttttcgaggtcagtaggcatctgacaagattggtgggcaaagaaacaaaacaataaggaatattttgaaaatcttttctgtagctaaaaggtagtagagtacagttgattgaattacaacacaggataaatttattgtactcgagaatgctaatggggatagaatcaaaggtcaatattcaatcaacagaattttttttttcgcttggtaggttaaatggaaggaattatgcttattagtatagtgctatagcttgcacattatttatatttccaaattgcaagaacttcagtcccttatgttttaaaaagcctaatcactgtaagcaaaataaataaattttatgtcttttatcctcaaataaccttaataaatcagcataacacacatgggctgtggcttttccacattttgacttttttcctcatcaaatatagatcgtatttttttttccttttttttctgtgtagtcccctatttaatgggcatttgtttccaattgttttctgacagaggaatgacaatatcatcagtttggtaaattaagaggaaaaaataacagattttcacatactggaacctcaggccaaaaattttaaaaaagtttttagatgcactagtaccacccttatttaagaatattataatatttgtaagattttacaaacctttaaaccataaaatgaacttccttagacatgtgtttcattttgacctaacatgtttgaatcatgaggagatttttttaaatgtcttttttcctaaactttttattctagtcatgtgccatctgtaagtctgaaaagttctgtaaaatgacactttaaaataactctttcttagcatatactttacatgtacattgcatattgcatagttttagtcatatataactatataatcacttgattgccatttataaagtttggcataattatatgtgagaagcaagtgcattggtttaaaagtatttcagcctttaactggataaagtgttttctcttacttactaaatgacactatcaattttatctagagctgcaggcgattcattaatactttagtcattgaatatatgacatttaaaatatctaactgaaaattggacacatatactgcatcaaacatgctattggctgagatttttcttaaaatttacggacatctgtagtctcttcacatatacttctcaacttattttccaaatgtatattttataaagaagaactactaaagaaataaattagaaaataaaatatttttgtttatttcacttttcctgtttgatcttttactgctttaaaaatttaccctgtaatattatttatgagactcaataagggtggacttgactaatagttatagtgtgaaatgtatcttcacttcttgcaagggactttgagagtgcagagtattgtaaataattaatgtaacattatgcctgaagcatagagggtattcaaatgttgtagaaatgaattagaaaaattattcctttttttgtgtatttagtaacacacaagaaaatttaactactgatggtagaaagatatcccagggaattatatgtagttagtcgctaattcattggtgttcattggaaagaaagtggacaatgttcaatggaattaaatgtgacaagtaatgttatgaagagttatgtatagtattatacttcagagcagttgcatttcagagtaatacagacttgcttagaggcacattaatagacttttttttccgtttcatttataaggttgtcaatagcaatgaaccttgtatttagttagaagtgtactacagcagtgaagtctgaaataatgtattttctgcaccttcacttagtgaaccttgaaagacagagtagtgaatgaccatgagagtattcttatggaacatgctaaactgagtttatttagttgtttccatagatttccttagggtaaggcaagaacttatctctaaaggaaatgccataaaacctcttttgagagaggcatagacagttggatgtaaatacactcatatcctgctgtattaaatcctgaatcatcctacatctttggaataacgattagcatgcttagataaataaacatcccagatgcgctgcaaactgtcatatatgtcattttttatcaatgagacctttgatgaaaattgaggctacagcataaagattctgtgtggcataattagcatacccagaggcttgaagggttgcaagacctaggattggcatacaggtgtgaaaattagaggtttaaataaaacctgttttttttgagatggagttttgctcttgtcacccaggctggagtgcagtggcgcaatctcagctcactgcaacctccgcctcccgagttcaagcgattctcctgcctcagcctcccaagtagctgtgattacgagcgtgcgccactacgccctaatttttgtattttagtagatacgaggtttcaccatgttggccaagctggtctcgaactactaacctcagatcgtgatctgcctgcttcagcctccccaagtgctgggattacaggtgtgagccgctgcgcctggccaacaaaacctttctttaaagagtcagccatccattcctttgcatggatcatattatgtgataggagtactagatttaacaaataaaacacaagatgcctagttaaatttaaatttccgatatgtgatgaatgctttctttgaacagtataagtgtctttcacgcaatatttggaacatatttctaggaaaaaatattagtttttatctgaaaaacaaattgaactggatatcctgtattttctctagcaagcctatagtgagacagcttgggacagacaaggatcagcatcatttttgccacatgactagtgctgtctaagggataatgaatttcccacagactatgtttctggaaggcaataagtataaattttatttttaaattgaattataacaggaaatatttgctgagtgcctacttgatataagaaatcctgttaggtgcttgtcagggaacaaataaaattactgcctttagggagaaaacaagtttagctaggagacaggaaattaaaaaaaaataaataaataccaataatacaattacaaataaagaaaattgttatgagaaaagagagctatctttaaatagaaaggccagggaagggttaactgagaggatatgttttgagctgaggagtgaagataaagaatgatctgagatagtcatgtccaaagctaagaaaagagctttctaaggagtgggaatctatacataataataccgtaaatcaagaaagaacttgacatggagcgtaatggataattatttctagaacatagtgaaaaattatatagatccttgcaagtcacagtaataaagtttttttttctttaaaaagaaaaaggatggcttgaaacagaaaaataacataatttgatatgtcttttgagatgagtctggttaacagaatagatggtagaagagcaagatcacaaactgggaaacaagtcaagatgtaaattcagtaatccggggtcagtgggtggggaaggctgatgatggtagacttgaaaaactagggtggtggccgggtaccgtggctcacgcctgtaattccagcagtttgggaggccgagccaggaagatcatgaggacaagagatcgagaccatcctggccaacatggtgaaaccctgtctctactaaaaatacaaaaattatctgggcatggtggcatgcacctgtcttcccagctactcaggaggctgaggcaggacaatcacttgaacctgggaggtggaggttgcagcaggctgagatcgtgccactgcactccagcctgggctacagagcgagactccgtctcaaaaaaaataaaaaaaaataaaataataaaacagggtggtaacattaaagatagcaagaagtggattaatttaaggtttgctttggaattagtgaggagggcatgtagaaaccgttaagggtttagttgttaggtctgatagaaaatgagaatgaatcaggctgattctgtattttagctgagagtacctagtgtatttattcagagaaggaagccatggagagaagagatttgtgaagtaaaattcagtgttagtgatcagtagtgacaaactgatttgtactgtggtaggtatacacattacttctggatagattcctaaaatgaataacctaacatttccatctgatccccaaaacaaccaattttatgtgtttaaccttttgtttccttccttgtccccagaagactaattctctgcagaaaatgtggtttaaaacagaaatgcctgcattaactttcactttcagaaacgtccagtatttattctaaaaaagtgcattagatgttctgtgagttaccaagaatacagaaaactaaaaagaaagaaaggaaaaagaaagaaaagcattagggtagctgagataccactgtgacaaactgggctctttcagttaagagataacacctgtgaattattggaagcactaggctatttgtattactgtgttaccatctctgaatcacttgactggaactcttagatcaaatcaatcatacattataagcctgtattgataacacaatgccatttccaatgtattggaccaaaagtatcatcagaataattcagaaaaaaacataaatactgagaaatgagagtgtcatagcaaccatctatatatagttgaaatatcctcctaatggtgatggataatcataactgcatttccttattaaccatctatctttcatatatattgctaatttggtgttctaacaaattcttgcctagtatcaatctagtttttacaaaatattaactctagagtttttctatgaaaatgtaaatggatacttgacacatttattacaatgtaacatagattattgaaacatgaacaaaataagagtcaaaatattttgagggagaaattaataacattttaagacagtttttaagtcagaatattttaaaagtgttttttttgaattttgttttccatcaggaatgtttgaagttatttcctaaataaaaatattatatatttcattttccatgttaaatacaatcaggaaattaaagcaaagttttgtttaaatcagcatttatctgtactagagaattgctgtactagttacttatggctcaggattatagaactgtttgttgatggaatagttaaaaaaaaaaggcaaaaagaaaacaacaaaggctggaagttgaaatctcctaacagacatacctattataaccaaaaattacacctaaatataaatgtctagcctgtattcaatatcaatgcctatttacttagaacatttatagttactttattggatcaactatacttaatttattctgtaaaggcaatttcagccacattttaaaaagtaagaaagagaatatattgtaggagcaattgtgaaagttatctcccagtgaactttttttattcaagaaatctttagatacagcagaaacttaaatgaaaatcgtgtgtagatcctatgtttactaattcagtgctagcaaattatatcctacaaataaatcagtgttaaaccctgtttgttattttcttttgtatttactataactactttctaaatatgtatttgcttaaagatttcacccatcatatatctctgactcaaaatccatatttattcatatctttaaaagtgcatttgcagatgtctagaaacatactattacatgcttcattgggtttttataaacagttttagaaatatttattaattagcattaccaaatgcacctgaaatgctcaccatttcccatgaacgacaaccaattataagtgaattatagtgtttttattgcatagtcatctatgaatagcacatgtcacatatatatatttaaagtcagtaaagtgaaaggaagccatgtatgacattaatttttaatgaaatccttattttataaaaagtaatgccatgttaacatgtgttcctttccctttccatttctcacctactctctttctctcccctctccttctcttttttccctccctctctccctcctttcccttcccctctcttctcatcccctgccctccccactctcctctctttcttccttcctttcttccttccaacaatgaactggacactttcctctcaatgaaatgaattgcactttatcttccttgttgtattgaccataactgcttttgccatgggacaatgttaattataggtaagtttataaaataaaaatagaatattttgtttgataatgtctgtcacatattttataaaaacagtttatatatttttatatttgattttagatggaataggaattaaggtctgttttaatgtcattgcattgaaattaataatttaagttgaaagtaattttgtctgattaacttaaacacaagggtattgacaattagttacaaaataaaaacaatttattgctgttttcttcttacaatgaaaaacatttcacattttttaaatcaaagcaactaatctggatgaattaatttatctatatttttattccttatagaacagtgataaggctgaatttcgttggtactcttgatttttcttctgctaaagtaagaagcagagagagaatttgagacagagcaatgactagttcagctagtggtaaatatagtcactactgccttcttttaattttaatccaaacattcagatttttaagttaatttctgattgcttcatattttcctctacaatttttaatttttatataaatggttcactcagcaaagcaaaaccttaattttctgattatttttccagagaagcagatattttctatgaaaggaatttaatacaagaatatactatacattatgtttatgctatgagccagacactgaggtggaaagagatgaattagacatgcttactaacttcatagtccaagatctccatatctgtatttttaatgtatgttagaattaataatatacctttacctatattaaattatataagcttttattctagtctatattattttacagaagtagaaatcacttaaaagtatcataattacatttttaaaataatatatttttaatatttattttctaaaaaatgattactatcactacctatgaaatggttctcttatgcttgagcttcaggcttgaagagactatacattttggcagttcatcagtatcagatatttgcatagtacacggtgaaattttctcacaaaggtggtgtctaccttacaagtccatgaattactgagggtagattcagagatgaaagctcataatattcaaatgttgttcaggccagaggggctaacacataaattctaataattatcagagctttcagagctgcctctgaacttttatgcaagagtttcacgaaattaaggtttgacatgaattctaatgaatttaaggttaggagactttatatcttaatgaatttaagatttaagattcattctaatgaatgaatgaatttaagcttatgaacctttatatcttaaacaaagtaataattaccagctttatcctgatttttttttcaacagctacttggtaatgtctactaactatatttgctgattgtattattaaattaatattttctgatagtctacttatttcttatgctgtatatttgaaagcagtacaaagtcgagtatacccgaaacaaattgaatgttttgcctagatttctttttttcctcccctcatatactgttttgccttaagaaattgttttcttggcatgaaatcactaatcagaaattccagtcaattctaaagtgacattctccccacatgctattggtgttaactataattaatcccaacagctgttgtcttcttttatgtgtgacatttgtcaagaagtcatcctcgtagtgtcagctaattattttgtatccggactgttttattcaaactagaaaatatatttacttccttatagaagtaaacatctctggttaatatatgtgtcattttcaagggtaatagacagttgttttcaggtcagtttttgcaagtgcagatgtaggacgtcatggattgactccggtgtaaactgcagtgtcagacatatccccaggatgtagcacagtgtatccacagagggcgtactcatctgttgtttcagttttctattgatgtgtaacaaaacaaaactaaacttggtagcttaacagaaaaacaattcattatttctcataattctgttggttgattgaaaattctctttcattgtcaactgaacgctggactgccagacagtcccaaatggcctccctgaaatgcctgactgttggtgccacttgccatctgggagatcagctggagcttttgagcaggacttcatttgtccttcctcttggcttctcctcatcactacttggccttcctcacagactgatggctaccatccaacaaaggacgttccaatgggtgctgaaaagctgtgtaactcttaagacccagacctcaaagttacacagtgttacatttttccaataaaacaattaaataaaaaaattaattttatggatacataatagttgtgccttttatgcgatacatgtgataaattctatttagatattttacccatttttaatcagatctatttgctattgagttgtttgagttccttatatattttgattatgaatcttttgtcaggtgaagagtttgcaaatattttctcccattttatagattgtttcctcactttgttaattgtcactcttacaagattcaatttgttgagtttgtgagatgagattatagtcaaataggtaaatctacctcctgttaactactcaataatataatttatttattcaaaaaatgttaattgctgtgttgaagatatagatgtttccagagaagcagacattttctatgaaagggatttaatacaagaaaatactatacattaaagattagttttttatctattcaaacattcactaattagtttttgccttgtttcacaagaggttaatgtatttattgtggtttatgataaagcactctaaaacaataccataaaatgaagcaagccatcattctagaaagaaggaagagttatgtagagaaatgaaaacactgtattagtgtctcaagcctcaaactgtaccaatgctgtgagaaattcaggaacaaaaagtaatttagtatgaagttatcaacatgatatttctcagaattgtgtggtatgtagcacatgtattttaaagaatgttatgatattctgtgatcatgccaagtacatgagtgggtcattttcttttctcatgagtactttaccttcaatgttgctgaaaacaagctatattctgaaacctaacctactgatcaaactatacatttgcacattagaaaagggcttgcttcgattacatttttaaaaatgtaagcacagttttgtatgcctttgcctagatatttttccattgtcttgagatttgctgaaataagggaatatggcagtaggaagaaaaggacttttgatttgagttctaattttttatcatctttaatatatacagctactgtatatatttaatagtttcctctgtaaataggtagttaaatctgtctctttaccgacttaccattttgtagtccataaataatctcagcattttatacaactgaaaacctatttggtatgagaatgaaataagtaatgttaaagcagaattacatagtttacaataactaatttgttatcatgcttacccaattaccaaaaccttgttgcatgcttgtcgtgtgcgttgtcaaaaattaaaataaagtcttatttctcttaaaatatgaattttgtgaatgtgcctatgactgatggccacacatccttcgtaggacagctgctcatcaattagaccctttcctatcttagggcctttacactttctgaaacttctactgaaaagcctttctgcagacactttcagaactcagcttcttcattccttactcagttcttttctgaaatgttttcttctttgtgaccgttcctttagtccttcaatgtttcttatcctcttccttcgttttttttcctgcacaatatttatcaccatcagacagatcttgtattaatttatcagtctgctgcctgtctccctgtcccataggatgtaatctctgttaccacaggaaataatttttgtttaatattgttcacagccagccttggtggcttatgcctataatcccagcaatttgggaagctgaggtgggaggattgcttgatcccaggagtttgagaccagcctgggcaacatggtgagaccaccatctctaaaaaaaaaaaaaaaacaaataaaaatattgctcattactgtatcccgagcacctggaatagctaccaacacatagtagtcacttagtaataattttgaacaaatgaattgatcattttttaggaaatgataattcagcattaaaattaatgaaatatttaacaaatatattttaactggtattgatataaaccttcccatgttgattcatgtagagtattatttagtaactttataatagtgttaaattccacaagagcagttggaaatatatattagtttcctcattggcacatctcacacagtgtaagaggcaaacatctctaccatgaattctctgcacagtagaaaaatgttttaataaatggttaaggttgagtgtggttactattttcacattaaatccagaatatgtgttttcagatgaaatgaattcctccagttttactctggtcttaagttgcagaggcagtagcttcaactttgatattcatctctattatcccagctattaatgtgattcatggtactgaataacatctataaattttgtcatgtgtctgttttatcattttcatcagtgttttgctctagttgaattggctttgataaaatttatattagctatcttcaccaacccaattttattttagctcttcaatttagaatgttacttctcatgcaattgctatcataccccagtgcactggaaaggcaatatctttctaaaatatactgtggttattattttaacagagatcagcacttggcaacttgacatgttgggcagcattgttcctactaagatatacgtaggcctcatccaaatcgttttagtcacttactcaaagtgttctatggaacatttgctcttctgtgagacaaaataaatagtccagcaaaagtaagataatttgataatttttaaaaccaaattttgaacgtgtacttttataatgtttgtattaagtaatgcaatacagatgataaatccttccaccagcagtgactgtgcatacattctgtgatagacttgttgctaaaatatggtatgggaataagtagccgtttttgagaagttactaaatcttaggcatggtgctaagaatgttatataaattactttttgcagtctgtactacaaccatatgagacaggcgtttgtttattatttccattttacaggagaggaaattcagggacaacaaggttaaaaaatttgcctgggtcacataactgatacattatgaggccagaattaaaatgcttgtggtttgacttcagaagcaactctcttaatcctaatgctgtgatggctcccacataactgaataacagagccaccgtggatagtgtctatgagagagagaaacaagcagatctgtctttactgtgaagtgaattttgtggcagtagtaagtaagagatgccatggggacatattagtgggggcagctaaatcagctttgggaggtaaggacatgaggaaatggtaaggggagagaccttgttaatcttttcactgtcgtattcccccacctggccatggcagtacttggcaagagaatgtgctaaacaggtactgttaaactggtaaattaatcaggtgtgacatctaagcaaaatcttaaaatttcaatgtatgaaatcccaagagatctctttgagaaattcgtatgattataatgtagatgagtctcagactacttgttctatgcattgttatattcttactgtatagtatctaaaacaccacctcagtgttactgaccaagaagactaagtgtcactccaatttattatagtaaggctacattggaaaaataacgaaaaaaaaattaaaagaaaaaccgaccaacttcatgatcccacattttcattttaaagatctagcagttgatacatgtaaagagatgggattgaatgctgaccactacattttaatcagtttatgatcctaataagaatttaccagaatgtttattatcttaggtattaaaatggcaaaggagaaaaacattcgttttctaatacttatatagtaatacaagtattacttggggaatgtgtttgggctttggaggaattttactattattgtacaatttttgtttgaattatatacgatggtttgaaaagaggtaatttagctattctgataaaatttaggttagggaatttgtggaggaaggaatacaaccagggaattagtttctataaggacatgggaaatgctagtgacttcacctgccaagggagtgctttaaagttgggatttataaaataaaaaaaaaaagaaaagaaaaaagtaatctttttatgatatcttcaaagagtgttgaacattctctgttttaactgtggagtacattttggtactttaaaggctggtagcatcatacaatggttctcagaatgggcagcttcttacagtcaccttggggatcctttaaaatctgatgcctgggctccccttatagattaggatttaattggtacaggatgcagacctgggcatgaatacatattgttaagctctccaggtgattccagtgcacaaccattgttaataataactaatccagacctctatagcaaattaaaatcaggatggttatttattggaaagagttaatattcaaataacagtgtctctatgtcacatcccagtttcttgccaattttcccttctagtaaatacctagagtattaatattgaaagaaattgttccttgttctcagtgaacctctaatgaaatgaatcagcattgaaaaccctaggctatttctaggaagagaaaatgaattttattattttgaaagttgttcaccaaatactgtcattttagcacttctgcagcctatttttaaaaataagtttatgacttggagtgggagggatggctgtacaccacacttacagatgcatttgtctgaggtgataggggagtcagcactaatttagtcagtgtggacaagtgacatcgtattttcagtaggatgagagtaatgtgcatatgcaaaataatgatacatttcccagacatttgatagtacctcaaagcaagttaaaatgacaatttaatcttctgcagttatgaaataaaatctaacatttaacacactcttacaaaaaccgatattcactataggtgggttttatttttatttttcagatttttggctgaaattaataagaatgcctgtctaaaaatcacgttcatccatatgttgtagatgtcatttttgttctatacttcattacttttgagagtagttggagattagcaaagactcatgttgaaaggtcttcaaacttaaggcacgtggttatgagccattttcttcaggtactcaatttcatctttagctaactttcttgtaatgactcctgtctagcatgacttttgaaattgcaatcttccttctagaattatttctactttacttgtaaaaaattgccttttcctttatattttctagcttttatggaaaaataattatcaacatttattatttgcttttcactttcaaagtcagccatacgatcactttgagaaatggtttagtcacatctcccaaagcttgtgttgtagtatcacccagctgttctactcttccatatacttgcagcagaaataaagtatattcatagcagcactattaaaaatagccccaaattggaaactatgtgactgccaatcagtattaaagtggtgagtgtattgtatcatgttcacacataaatttactgtgcagtaatgagaaataacatctaaaggaatatgcataaaagtgggtaattttcaatatatcatattgaagaaaaggaataagaagaaagtgtaatatatagttccattaatatacaataaaaatgcagcccgaactaacattttagaagacaggatcgtgatagccaggtcaaagtgaggaagcagattgcagtggtaataacataagagatgcttctggagcactgatgcggttctctttcttgacatagattctagttattttcagtctgtgacagttcatagagaagtaactttataatgcatgaggggttttttttgttgttagaggagcattatgacatagacaaaacaaattatcgctagtcccattataaagagaagtgaattatgttaaagctatcaaaaattagttttcaaaggtcacaagggtaatagttttttgtgtaatagctcaaatttatgtcttcttttttcatctcttttctaaggaacttaaaatttgtgctttgatttggccagaaaattataaaatgtgatggctattaaataaatgtttcaagtttacatttgaaattagttcaagtcaacaaaataaaagaaaatctaagatattatggattctatggcatctaattaaattcataattttgggaataattttatttttataaaattttgaaaaatggataagaccatgctagctaacactgctaatggataagaaacagtttagttattggcaataattaatttaatcctgtttcctgtctatacaaaacagtaatacctgtgaacctcaagaaattaaatcatgtaagtgtttaaaataatttatatttagtaaaaggttaaaatatgaaaagaattatttggacataaacatgatttatctgagtagatcctatgcttgtaattttctacaatttttattccttcatatataaaagatgatctacatgatgatgaagaatagctttatttatatatctttgaaaatacattgaaaaaagaacagaaaaataattttctatgaagcttctgcctaaaaacaaaaatacgattgtaaatatacaaatcagtttctttttgatttttaaaaaagataataaaatttggaaagggaaacaaagtgggtaggtatccttttttaaaaaaatctgaggctgggcgcagtggcttacacctgtaatcccagcactttgggaggccaaggcaggtggatcacctgaggttagcagttcgagagcagcctggccaacatggtgaaaccccgtctctattaaaaatacaaaaattagccaggtgtggtggtttgtgcccatagtcccagctactcgggaggcaggagaatcccttgaacctgggaggcggaggttgcagtgagccaagatagcgtcactgcactccaggctgggcgacagagcgaaactccgtctaaaaacaaacaaacaaacaaacaaacaaaaaaccctgaatgtattatacttactaatttgagtagccacagctaaagatagcactatttaattttactagacaacatcattttaaaattatacttattagttcacatagtcatgctgcaccacatactttttaacgtttctttccctggtgagttttagcctccaacctccatattgtacttctccatcaacaacaacaacaacaacaacaaaaaagggaaattctatgtcattcagttacatttatcagacttcatcctattcccaataatgtgtaggctctgggtcatggagggctttcaaaggagaaagcatcttttactttctgtttttcaatgaagtcattttaaaggaacagttaaataaatgatttggaattaaatagaactatgacatgacataaaccatgtaaatagaagatcatcacaaaatggtgctagttattaaaactttatttcttcctgaggattacaccatcccagtttgtataattgttatgccttgggtattcattaaacctgactcactactgagtgagcacattagtgagataacacaccgaactgtcttgagactagaaatctataggggaaattatgtcgtcagggtcagctaaatagtgtgtctgaacttctagacttcaaactttattataaaaatgtacttctagacaatttcatcacaagctaaatgagtatgatacatgtgattctcactgtgttaacacaaataagtacttgtgcaaaaatggaggatattcatttatttgactacgtctgagtgttttacagggtcaaaatgaagtgtttataattttacccagcctggttacatgtaatttaagtagccttgcccttttattgttctgtaatattcatattatatatttgaagtaggacaagcagatttcctataaggaagtacaagtaagggactgggaaagtgagcatgaagcagataattcaaacaatagcaatatttaaagcaaataactatttagatataggttaagatctgctaacagctgcaatagataataaatacttacaaatttttgccaattttcagtagtatatggaagtgagaacaaatttggaggtattgtttttcatgtttgatgatggtgttatggtataattacatatccgtgaaagttatttaataaatatactttgaaacaaaaagtaatatttattataaaagactaaaatttttctataactagctatgggttaaaatagcaccaatattctcttatcattgtgttattctctaaaggaagctcttattaaacataatgcaggatataattctactgatgtccccttaatagtaagcaagactctggactaaaagaagtgcttgataaataatttcataggggcccttggatttttaaatcatgaagcagatactcaaatgtgtgtaaattgtagatgacaaaattacgtaatgccagtgaattgcagggaaggatagagctaattacatcatatgcatcttgtggatcacaggatacataagatatgtgactggttccgtccatttaagaaacaaaggcatataaagagctagatatatttaatgtgccttgagtggtaattaaaaaataaattttaaaacccttcagagcacagaaccttttcttcaagttcaatttgatgtaaggccccattatatacaaagtataaaagtaaggcagattaaatggggcaggtgtcttggaaaccagcccagaaacttatgagaaccctccagggattccaagcattcaacagaacacatgtgcattttaaattatacagtgttagaaccaagaaagctttagcatttatctagactcacttctgtattgtacaaatgagtagtaaagttcatcaggtttgggggtttgcctttaatcccatagaaaataataagaaactatgtattttgaagccaaatcaatggtattaaaccattctatttttaatgttttgttcagttggtctctattttaatagcaaatacgttgaaagtgaagtttttaatatataataaaataaaaataaaactgggtcatttcttaaagggtgcctttgaagttaataatggctgaaaatataaactcatttgcttctagataagatttaaaaattgtgcaaatgaggatgtcaaggattaataagtgaatgttaaaatttccaaacttggccagatgtgttggctcctgcctgtaatcctagcactttgggaggccaaggcaggaggatcccttgaactcaggagtctgagatgagccagggtaacacagcaagacctcgtctctatttaaaaaataaataaaaaaaataaattccagacttgattttagcaagttttagaaagtaccataattgaaagttaagcaagattgacattttcaaaagtgatctgaaacctgattatttttatattgctcttaaatcctcacccactagaaatcataaagtgatgaatttgttggatatgtttatagaagggtctttctgaaattaatttctttggggaaaattgccagtaatttactccattctgatgcaaaggcaaggatgtgagtttatgctctagtcttttctggtcagcctttaactagtctacatagaaatcccagtatgtgtctcttaatgtcagagcaatgccgtcaagtggtgtctgcctagttactcagaaacttgccatgatagatgggcaaggtggttctatttgtatttgtaatggaacaaaggagagcagctgctaagttgcgatcattcttaatttctgcattatatccaagagaagaatgcatatgtgtttacattgaccaaatttggactatgcagaagagatgcattcactggggaagaagggacttgatttagactctatgcaattgggcaatgaaaactgaccaggcagaagtgggggagaaaccactggatccctggctgttaaaaagtgaataagcaatatctgtaagtgttagtgcaagtaaggaaacatttccaaaaacctacagaatgtgtgctctgaacaaatgagttagttttaagcatctcccagttccaagaatcgagagctatctttgggcattaccaatcaagtaagatcttagttgctttgcctctcttatctacccacccatcttcaatgcccaactttttatccaggggcaagagaagaaatttcatcactaagtaagttcagtgtggcaataggataaaaataaatttgctcttctggttcgactctgagtcttcttcttcagtgttctggttatttattaccgctggtgctaacaatacacttggaaggagattaagtatgcactattagtttggtttaggaatcttcccagttctcttccactgacataattcagttcatgtatatatttgagacagcctagtgcagaaagtgagaagagactctagaacaagcctgcctgggatcaagttttagctctactgtttactcacaggatgactttggacaacttttatttatcttcttggtgccttaattttcttacctgtaaaatgagtctaagaatagcatgtaccttataggctcttttgaggaataaatgagttgcagaattcctaccatatgtaaagtagcatatgtaaagcatatgtaaagttccacaaaattattgttgctaatattgttataaattacagttagttggatatcttgttactgacaatgttagatcaaaggccgtgtatatttacatacagtatttattagatactgtcaaactaccatctaaaagctttttacaaataattctctctctagatatagtataaaaagctaattataaattgaggccatgtgagggaaactgtcaggaggtccctttagcaatgaatgatagtttatagagagtcaaccactttgaaagttatttgggagaaatatacagaacaggtggactgcatgacctgtttgccctgtgaaaataggtatttgaaatgacctgattctcaacctgagaattttcaaagtgacaaattacactcatttggcttgtaatgatgttctgattataggctataagaccaatgatggatttccctgacttcttttcttaatgttctcaaatcctgttgtgacctttccatattcaagcatgtagcaatgatttcagaaacaattaaaatttttataattatatagttaaatatgtatttcttttcttagcacaaacttacatgctttactttaaatcagttattctatatgcaacttaattttaatgttatgcctttagtttacatacatacaaaactgtgtgatatttaaagcagttgtaagagttatcagatttctcttgtctttggtaggatttgtgaagctctgcaaatcagagataatttagatagagctctatgaaacatattggcactatttgttttggcttgttttcgttaattttaattatcatcattaatttattctacatcctcagtatttattgagtttcttctgtgcagcaggaaataaagccaggcactgaaaatacaaatgagaacaagagagatgaggtcactgtccttaggatgattgcaacctagtgggggatgaacaatgttacattttgacttgttgacatagagaagaagggttagatcacctaagcaaaatagagaagaggactggtatttaaaacctgaagagaggctgggtgcggtggctcatccctgtaatcccagcactttgggaggccgaggcaggcggatcacctgaggtcaggagtttgagaccatcctggctaacatggtgaaaccccgcttctactaaaaatacaaaagattatcctggcatggtggcgcgctgctctaatcccagctacccggtaggctgaagcaggagaatcacttgaatccaggaggcagaggttgtggtgagccaagattgcaccattgcattccggcttgggcagcaagagggaaactccctcaaaaaacaaaaaaacaaaaacaaaaaaactaaaaaaaaacccgatgagaggagaagaagcaaatgagagtgagaaagaaaagcaatttagatggatgagaatcatgactgtgctctaaagcaaagtgtagaggaaactgtttcaaaagaaggtggtaaatagagcatttagagtagagtaaatagagtagataaatagaataaagtccacatatgacattaaaatatggaagtaattgaaacattgaccaagcctgttggttgcaatggtgggtgctgaaactaaactgaagaggatttagaagtgaatcagagaattagaggcaatacaaataagcattacttacaaaaagtttagctgaacagggtgcagagaattgggatgtttgttgtagagaaatgaggaataaagggagaattttggaaaggacagcgtaacaaacaaacaaatgaaaaatccacaaagggctgaggttgatggtgaaggtaaaaaaaacaaaacaaacaaaacaaccgtgagtgaatagagtgaataagacatggttctagcatgggaagaggtcacaatgcacctgcaagttgaggtcagccattcagacctaataattattacacacaagaagagtcttgaaagaaagaggtttcctggaccagaacaccaggttcaagatattatctgtacatcctagtgtcgtgaggcaaggggagtagagtgatagactagacacaggcacacaactttatgaaagatacaagaatactttacacacttaccaatcatgggctatatccttttcttcttcagattaacttttctatttaaaatacttagttttgaattaaatagatactggctgtaaacaaaagctccgtttatggattattcaaggtaactatccccatctctctgtttatcccagtccattgtaacagtaaagctctctgtgtctatcatgtctagccagtctgcatccataataagcactcagattacagttaaatgaatgaaaggattataggtatgcaatattggtattttattagattattatcttttttaatatataataaatgaaatttcctgtaaattcttcctgttatagccatgctgaggggaagaaaagacaaagctacttagtcatgattgacagaaatgggaagttaagtacagcctgttctgggaataattgtggtcataacagggaaaacaaaagtgaaaaacctcataaaacagttgacaataatgtgagaatataggagtagtacttttccttttttttttttttttttttttgagacggagtctcgctctgtcgccaggctggagtgcaatggcgcgatctcggctcactgcaacctctgcttcctgggttcaagcaattctcctgcctcagcctcccgagtagctgggactacacaggcgtgtcaccatgcttggctaatttttgtattttcagaagagatggggtttcaccatgttggccaggatggtcttgatctgttgacctcatgatccgcccacctcggcctcccaaagtgctgggattacaggcatgagccaccgcacctggcctcagttattttcatttttatgacagttacagttctattgagaaattcccaacatattgttattcttgcattattatttcaaattttgaggagaatataactgttacaattaaatatgggtattgaatttaaaatgtttttattaatcttgatgatacttttttactgaattttatgtgccttgtattaaagtgttttaatttcatatgaaaataccaaaaatattacacaattttccaaaaacaaagcaatgagaaagaatgaaaatatgatgacacgtacaacctacatttaatcttatcgttagaaatacgttcttaatgtatagttccatatatacatggaatacaatgtacagttccataataggacaaattctaagcttcagcaacagctccaatttctctattattaaaactgtaattgcaattagtatatgtttttttcatttaagtatattttaatttgccatgtggttattcatttctctgattctttatcagaaaatcatttcaggctagagggacttggaaacataaggatatgaatgaaaccacatttataaagagagttgctgagttattattatatcttaggacttgacctaaactttttacatctattaactcatatacttttattttataaagatgtgaaaacctagataaatggacacaaaatttaactagttcaaggtagtttacactagtaaggggcaaacacattattatccttatcactctgttgtacactcagtgtttccatgagtccagtagcactaataaatcttactggtagctgtggtattaaatatgtacaaaattggcagctatggtattaaatatgtacaaaattaaattgagagacacaaacttgacagatttcaatattttattttgtatttttaaattttaaataattgacaaatataggctgaataaaatatccattttttcaaggtatacaatgggggtgatttgatatatgtatacattgtctaataattactgcaatcaaattacctaacatccatcaccactcatgttgtacataagaattcctgaacttcttcatcttttgcctagaagtttgtaccctttgaccaacatttccccatttccatcaccctgagcttctggcaaccatcacttcagtctctgcttctaagaattcaaattttttatgatctgtatataaattagaatatgcagtgtttatatttctgtgtgtccagttttctctgtgaaatgaatgataatgaaaggagtagagaagatgttatgactttaagattagggaatgagtgttacagcaaccactgaggaaatataggaatggagaacagaaacaaacatcattcatttgttcgtattgctatattttggtaggaaacacatagaacctcaaagaaataaacatgcataagtttgtaaaattgctaagatgtaggaaatataaccctcaacttagtaacgtaaactatggaataaaggggaaaaatctgaattttaaaagtatgccatgtttacaactttcagtaaaattattctacagataaagctttgagtatgtatctcatccataaagacctaaacagaagtacatgcataagaaaatgaaatattcagttaaaaacagagttcaaaggaagagcagaataattaatgaatgtgcattcttcttttcagcatcactatgtttttgcttctattatgacatgagattctgtctgtaggaaatcatcccaagggcataaaactctcaaaattgacattaatataacagcattagcaagaactaggtttttatatgataagtaaaaagcaaaatctagaatctgaaagacattttctgttttgtagaaaaggataagaaaatgatatgactaaaaattattctgatgtgtgtttgatcaactgactcttgaacatgtattttgacagcatgtgcgatactccagacatgattgctgtagctgtaatgcacactccaaagtgtaaaaatgaaatgttagtcagactctagtaatagtttctcagttttatacattcaaaagtgccaaacctaggaattaagtcactgaatgaagaaataaaactgtgtgatctacattgatcatatgtacttataatgaggatggagaggtagtttaaaattgtgacagaggtgattaatatctgagtttaaataattaaaataatctgacttctcaaaatatattttacattctcagtcaacttaagctggatcagtgtatgaagtttttgtaatcctacatgatttaaattctaaccaaaaactctttagtgtgattaaggtcctatggcgtggtggacactgagaaagcccactcagttcccactttaagaaagaatttgctgctcctccttctgggagttttgtcagacttagctgtcagcacccctaaggactgcctcaaccgcagagagctacctcaccaggaatcatgcccttcctgggtcaacccacatccaatgactgattgaggctgggcaaaaaggactgaccatttcttcccaacacaagataactctggtgagccatttcggttccacagcttcctatgaggattgctgaacctgttgggccttcattttacatcacagttgaatttttctttcttctcaatccttgcttcctgccctcctttccacaggggttgattcttgagcactagatgtttcttggactctacttcacaaagaatccaaattgtgacataagatgtatggatctcatccacaaatgtatagtctaggccctagggtcacaagatcaaattctagaggagtgaagtgagtaatttgtggagtgagtgacttcaagtatcaagtagtgagtgtggtggtgatatggcaggggccagaaactggagagcacagacctctgaaaaatcaaatttaatcacaataaaatgttgtgattttattttgaggtgaactagtttggatctgtgtctccacccaaatctcatgcccgcttgttatccccagtgttggaggtggggcctggtggcaggtgattggatcatgggggccgtttctcatgaatgatttaacatcgtccccttcagtgctgttcctgtcgtactgagtgagttcttgggagatctcgttgtttaaaagtgtggagcacgtagcaccttcccctcactcctcctgctccaaccatgtgagatacacctgctcctgtgttgccttcttctgtgagtaaaagctcgctgagacctccccagaagcagaaaccactatgcttcccataggaccagtggaactgtgagctagctaaacctcgtttttttgtttgtttcatttttgtttcgtttttgttttttgagacagagtctcactctgctacccaggctggagtgcagtggcacgatctcagctcactgcaacttctgcctcccgggttcaagcgattttcctgcttcagcctcctgagtagctgggattgcaggtgcccagcaccacgcctggctaactttggtatttttagtagagatgaggtttcaccatgttggccaggctggtctcgaactcctggcctcaagtgatctgcccaccttgtcctccaaaagtgctgggattacaggtgtgagccaccgtgcccagcccctcttttctttagaaagtacccagtctcaggtgtttctttgtagctgtgcagaaacagacaaatacttgaggcaaacaaaatatattttataaccaaagagaagccgctctgttaaatcttccaagcataaagccatatgttaagaggcatagaaataaagcagtactcagggatttcaaatctaaaatcctgatgaacacgttgcattttctgtctaaaataggactttgcaaggtctaacacatatcgtttctgtgttttctcttatgaaggataagccttaccaattcccttccaactctatggccaacgagttgagaatatagagatgactgggatcataagaaacagtagactgagctgagggattttctaggcaactactgagggggttgggagggaagttcttgagcatgtctaacatggagccaaaatatcatttagccattgtgaaatggacagcattgcacctttggtgacaaaatactgagtttgaatgttgcctttactgttactatgactggagatataaccagtggtctccatgcctgtctcctcctctgccaaattatgttaatattaaaacttcctactttacctggttcatatcactcttatgggtaatcatgtgagttaacatatatgaaaaccatttttatgtatttttatatatatttattcttcagaattttttcagctgctacttatctacctaaacagaatctagttatttttttaaatatgtaaagtatatgtgtgtgtgtgtgtgtgtgtgtgtgtgtgtgtgtgtgtgtgtgtattcatttggtgatctgtcctttctaaatttttaatatagttaactggattctatcaatttgcattttaatgcaattaaagtaagtataagtttcttttttccatttactttgagtaagaataatcatgtagaatacagtggatgaaaatgttctttcaagttggccggaatgtactttactggaaagaaaatgatataaaaaatgcactgaattatcactttcttaccttgaatagagaatgaccttatagaaagatgaattaaaatgctttagaagttgaatggaaacctgctagttcacttaataaaatgaagcattgactatccaaggctagcaatgtagaaaaaataattcttatcattctgactcttgtcctcaagattcactttcttctcaaggtctgttgataataactactggagcaaggctgtgggaacagaaaaaacagacatcgtgtgttctttaagacccctgcctactgtggctataaacttccctgtttctctctatattgtctacagtacacccttcaaatcaacagcatgaaacttagcacataaaaaagtacttgctatgagatttctgaatgaatataaatgtcagagaccagaacgaagcattcaagagagtttttaccagtgtctcagagatcaaataaaaggatgcaaacatggaaaattcactttccattatgtatctgggtggcaaattcaggctcagttaagagctcctgtatgtagggttaccttctgttctggtttgctggaacagtcccatttatgatttttgtcctaggatttaaaaaaatcatttctctttaaagtcttaaatgtaacccagtttgtatgcattgtgtgaccactctacatttcgatatccctattttcatttatagtttgtggaaagagtcagtcctcctccacttctaaggaacatctaatatctccaggatatttttttggattcaggttttattaatgtctttcattgcaaaatgtttccaattataaaacagtcagagagctctgcattaataaacttgcctgtctttcataagggccagagattttgaaatgcctggtgcccaaacatacatatgcaaacacacatacccagtgctactagcaggttgttacaaccatatctaaaatattccaaattcggacttgtgtggctcagacctgggtagagatgaaaaacctcatgactgagcttggagaaaaagcagctgaagcttagcatccaggcccaagggagcaagacatggaggcatgctcctgtctagggtcttcctccaattctgatgacctgtctaaagagcgtcttcctgtgaaaatgactaaccttgagagtagtgatctcattcagactatagtcccaatcaactttgaatgattttacttcatgacctcagtaaagaacacaaaaataataaagtaagattaatatctacgtaagaaatacacattaccactgcatagattatgtccagtataataggataggcctatgtcagtttgtaaaaactttattaatggaagttttgttgtcctgttctataatcgtatggcattcttatacttatgaatgtgagctatttatgtcacatctcgtgtcttctgtttgtcaaaatggttcaccattagaggctgggcctttaactactactaattattaatacaatggcttacacactctcataagtggccactaaagagagaattcacatgcttttaattatattgctgtgcatgttaacgcaagataatttttgccactccatgaagactgcccccgaattgtcagggattccaagaaagaaaatgtctctgtctctgtctctctctttttaattctcaaggaggcagcccaaaagagaaagagaagagagtaataaaccaaggtaaagttaagatgggactaactcagctgacagataacaatccccatgaaacccaggcttgacccctagtaacaatgccatgaaagaatagatagaaatgcactttgaaaaagatgacactttagaacataatcaaatggacttgcatgggtcacaacacatccttcataccaggaaacgctgcgtgagggttctcagaagtcgcatgactcatatagtccgtcaactctcaggaatgggttctgagaattccaagtaagacaaccccatgcctgaaaaaaaaaaaaaaaagccttgaaatctttattgtatttcattaacagttttactagctgttacttttcaacgtttaagaaataaagaagatagaaaccaataggtggccagataaaactgtcaaatgcaatttataaagccttagaactttctggtcactgtgaaacataaaaacataaaatcagattcatagaaaatgcagactataaacattttttttttgctggttaacttaccacactgctatcttgtattttacaggaaattatttgactcaattagggacaaaaatgaaaacatgtttgtccttaaaaataggtctaaattaatggggcccttcattttttttttttttttttttgaagtgtcaaccctcccaaaagcattttggttccatctttgagaaataaaattagtcttataaactgtgtgtgtgtttgtgtgtgtgagagagttttcttgtctgatacttttctaaccctagaccacagattctcgggtgtagtgataatatgtgtatagatcttctccaacattatctatcagagtgcatattaatgagtggataattggagaatacttttttatgattttaatatatattttcactttcaaagcagtttgacaacagaatgccctaatgaaagtgaaacttaatgagagactactgatacttcctaataccgtgtgtgcggattactaagcacatctccaaagtgaaacaactttcccattttcatcccatttctttgccatacacgtgtataatttattttattgattattaggaaatatgagaagactatgaatatgagtttattatccaatttagagaagtttatatttgagctgatatgaaatagtttatacctaaagcagtgcaattccccaagatcatgattttcagttatgctgctcccactgcctttttgtaaggaatactcctaatgacacaggtgccacggcctgtgaccagtaggcgaatgccagaatcacaaaacagcaagtttacatcctgggaatcccagcttaggcaatctgaatatgacttcataacaacaaatgactatgaaattctgacaaactaaaggacaatagtgatatgtttgtgtagtgaattaatggaaagaaaagtattatccagaaggatagaagctggaagactcaggctgattaaatattcactagatggatatctctgatgcttaaacttgggtacacaatgtagttcaaccccagtttttgttaatattcattgttgtaatcttccacagcatgtttaatgaagtagataatgtaaagcagtggttcattcctagctgcacgattgaatcctttaaggagatgcagtcactccagattttctttttccagtattctagagcagcaggtctcaaataatggtctctggacttacagcttcagcatcatctggggaatttttagaaatctgaattctcagatatttctctagaccttctaaatcagaaaatatggatgggtctcaaaatcatgttaaaaaaagacttccaggtggtctaactgtatcccaaacttgagaatcagtatctgggatgaggtctatgcatcagtgtcgcttaaatgtttcttgcaagtctcatggaatctggagttgagaagcacaagccttacaggaccttctttaaaaggggaaggagcatagcatagtggttttagagagtcgtgaggagccaaggctggctttggagctggaatatcagggttaaaattcatgttcctccacttcccagttttgtgactttgtataaattaatctgtgcttcagtttaccaccatataaatctggtgataataattgtacacatttcttagtgtagttgtgatgattaaataggccaagaaatgtaaagcacctaaaatagtgcctggcaccaaataaatgctcaataaatgtgagctagaatacttatcattaaagtattataattacatgccttgaatataaagcaaatatcctttttttttttttttttttttttctgaggcggagttttgcttttgttgcccaggctggagtgcaatggtgcaaacttggctcaccgcaacctccatctcccaggttcaagcggttctcctgcctcagcctcccaagtagctgggaatacaggcatgtgccaccatgcctggctaattttgcatttttagtagagacggggtttcaccatgttggtcaggctggtctcgaactcctgacctcagatcatctgcccaccgcagcctcccaaagtgctgggattacaggcgtgagccactgtgccgggcccatgctttgtttttatgctataaaaagtaattaattttgaataggttgaacttaaaacaaataaattaggttaagttctcaaacttttaacttgcagtaatgaaaactcttaaatatttataagtggatattttccatttcacctatatctattaaaaatattatcaatgtaggatggatgaatttctaggacatatatttcatcatatttttatcagggtatatcagatatggttatttgccactgtgaccatcactatcaataacagttgtttgtctccaatttcacaggctactccaatcttcagtttttaacctggagtccaagagcaccaactttaatggattgaactctataagaatatagttggtgtttttgaaactctctttgattttatagatttaaattacaattctgagttagagtcactagactgtcaaatgaattcttggcacaaatattttgaaaattaaaatatgaaggactcccgtgtaagaggaatcagacttttaaattaattggctccttttacctatggcctttgctttgtcttgttttcttgcctctcttgttaattactacctctagatctgcttattattcatttatgctcacatatttcaccaagaaaatctgaaaaacaaatctgtttaagataagaatatgcagtttttgaaagcctgtaagtgtaaaccacccagactttccacacctggatttaatggcatttgtttttgcctgtacaaagttcctttggagtatcatttcatatgtacagtaatgatgtcagggtgagtgaatttagaactgcttatacaattgtccagtagtctgatttcctacaggttacaaattttgtatcattcattcctggatcacagaatctattgcatttcctaatacatactatatgctcaatcaagagtttatgagtgaagaaattataacaactttaggagatgctgcttttctgtagaagttctgtaataggcaacagtgtaagtaattaaaatatcagtatttgaagcagataagactgaagattttttcctgattacttcttaaagtgtgtaggtattgagatctttttatgttttatcattgtggtccagattggttagtttatgactgtagaggcttatttataacttaagtttattaagtattcattttacatgagttcttcctttgagctatgccaatatgtaatcagtttacttacaaccataagattttttcttgtttgtttcctcttattaatgaacaaatcactttgataatgtggcagaatacttaccgtagttaacactggaagttactcattcaacaagtgtctattgagtatcaacaagtgtcttctaacatacctgtttacctttacctccagttactgcacatgatccatcttcaattttgacataggtgtatttgctgagtcagagctcacatataagtgattctacctttatctcccttggttcttacaattttagcatcttgctctttgatgtctactgctgctgccatcttggcatagcaattatttatagacagccatgccatgtaataaaaatataaatattattatttatgatgccctagttattgctggatttatttatgtggtcatattttatttttgagattttcggtagctttcttatacagggtacttgatacagaacacactatttaaccttgtgttgcataatgtttttaaatcaatttgacaaagggatttctttggaagaaagatatttgttttgttcgctgttttgtaaataacattttcaaacttgttatgctttttaaggctgaaaagaaagccatattggaaattagagttggattctagccaatattctgacaaggtgtcatctaaccttgacattcagattaacacagatcccttagtttctaccatgaatatttacatataccaaagttcaactgtccactttatttgaaagaacctttatcagactgctgatacatctactctctattatatagaaaaatattttagaaaaattgggctattgccaatttattcatatcattgcatatggccatctggaaaatgtttttcttaattgctttttggtgtgttatgcacagcaaggagctgctgtaactctcctgactacaattttcatataaatatagaacgtatcctttttaagtagatatttccactttccgttcactctttgcctcctttgtgtaagttcgaactctcctttttctaagcacacatatcattcactttaataatggacttctgagatatttgatggaagtttctgcaaaataacatatatatatatatgcaagtgaacattcacgtgtatatgtatatgtgtgacatgtgcacacaagaaagagtctaacggtaaaccgtattcatttcttgttctcctaatctaccattaatggtgtggatattatatttcacctgccgacaaaaattaaatatattttaatacacaaactgaacatttgtttatttcctacatgcacctgcaggcttttcatcacaattttctcataaaactgtatttagtttttgcattgtttgtcaacatgtcagaattaactgtgacactttaaaattgtattttaatttatattagtctgtggatactactgcgtaccagtggaatcagaatctgatggagtgtagcctttattttgggggcattctgatgtatattatctttgtttaagacctgtttcgttgtgtacattatgtggcttatatcttgttttaagtttagataatttttaataactagtgacacattataaagcctacactttttttcatttaaaatggaaaacaaggaaatgcaattaacagtataaattatttgtgtttatatagttgactatttagaagaaatatccaggatctttaattttttttaaggaaaaactttaaactttcaagaaatgttaggagtgattttcttactctattcagcagctataagaaaataccatagactgaggtagcctataagcagcagagatgtatttcacacagttgtggaagctgcaaagtccaagattaggtgtcagcagatttggtatctggcgaggatcagtcttctgtttcacaaatggcaccttttagtggtgcactcacatggtagaatggactaggtagctctctgtggcttattatataagggttctaatcccattcatgaaagctttgccctcataacttagttagttcccaaaagtccaactcctgaaactattacattggtgattaggtgtcaatatatgacatttaaggggacccaaacattcagattgtagcagtactcttagcaacttattcaatttcatctcttctaaaatatgtactgtgctttttaggacatcataggtgattagcaaatgttaattaagtgaatgaagagtattcagagtagcgtgtgggagatagaatgatggttaacttggattttgtttccatttgtaatacattaagtttcatatcacagttataaattcttattttgtaataataaattcaccattacaccttaggtaggacagaatttttacaacataaagttgtgaaagctcttgaaaacttctgttatcacttaactgttcaaacagccttcaaaaacttatttaaattagttgtgtatggaagaatataaaagtagattcacctaattataattgattcacctaattattctaaactaattataatccatgatgctgctatgaccttgcagaaagactccttagcatgttgaaatatcatatagtcttactgggtttgaacatttaatggcatcacgaacaccacccgcaataaattcatggggcaaaacaagctttaagaacctacgtgtagggaacggagtttgtttttatggctttaggttacaggtgttgttatatgcttctgcgacataaaattacatgttttataactttttcaattttgtcacaattaggaatgtaggatatcttaaatttgtaccttagttctttggtatagaaattggagaaaatgtaactatttttgtaagccttattaattaaaggatgaatgcatgcatgtattcaacaggaacccaatggaataatataaagtgcttcttggtctggtatctataacatttacagttaaatcagattattatagatattaaattatgtattattaaaactgtaagcaaataatttgcccatgggtgaagagatggccaatatccttttctttagactatacaaggtatttatcagtatctcaacaagccaaaaccacatccgttcacatttttaagaattttcacatttactttagaaaatcaaaaattaaactatagacattgtgattattattgaatgttaacataaaatggagatgtagtgcaagacaccttatcagttatgtagtcataattgtttgcatgcatacagcatttaacacacattaatcagaatattgttatgttaaaataaaatttgtcttattcattgggaaaagctttagcgttctcgagctttaatttaaagagtgggaaataatgtgtacaatggtaatttttggcactcaggaagaagcagaatgttatctgtcttggatgttattattgctctgtatatctgcacaattttcctgtgatctaccactagggcaggtgttgagagatggaacttgaatactcaatggaaattaaagatactgtgtttgaatctgtcatgccaagcaaggattcaagactgtgactgtaacacagagaaacaaaacaggaatgtaaactatttgaactaaggtgtaagttggggctttcccacagagaattaataaggtcctgactattgggaacaggacacaaagttattgatggcttataaaaatctctgacctgcaagtgcaaacttgagctatgggttatgtagatgattcaggtacccattccaaatacctattccaggatggcatgaggactggccaatcaacaggagactgagagtatgtgaggacagaaaactaaaactttaaatataggaagacactcccctccccaaatagtaaaatatcattataactcatatgcataaaaattggctgaccactaaatattacacttgaatgtaaactgcatattatcagggcaatacagatgctttagtctcttccttttcatatgacttgtcaagaagaattaaacagaagctctgaaacattgagttaattgtgctttttaatgggttctgtaaaacaggtatgactgtcattcttccaacttaaataaacaaaactatgcctatgaattattaaatagctgtttaatacattattaaatttttgcttctgtgaacttgagtaaccaaattaattgaaatgctgtgttagatcataagcccctttgaagttaattacaatcagttgctagaaagaattttccaagatatattgaaaatataccaagctataaatacttccaaggtataaattacaataaaaaatgtttaaagtggaatgtaacaatggacaatggtgtatgaccttgagtcaactgacaatgaataaaatagaacatattaaaagtatgttttaattatcacttcaaaccatttaaatgtctttagactaataaaatccaatctgtactaggcagcaggggagggtggaattgatgtctctgttgtaatattaataccagttagaagactttgtaatatttagagcccaagtgtgctgacatctacaaaatgtcataattttatttcttgttttcaatgttaggatgaccttgggtaaaagacagcatctttttattttagcttctttatggtaaaatatacatggttgtaagtttcagctttcattcagtgggtttatttgatgatatcagattctgattctaaaaccgtgaaaacttgaaatgtggaactgcctatgtggagattattgtagaggagaccttaagaaaaaaaaaatctttgacattttcttcctgtacctgcttagcttataggcaaaaatcaccacagaaaaataagtgacaatttaattcttaaaactcccaatataattttcccattgcatcattttatatcatgctcagtaagtttttagattcaacctaaaattatcttatatttataaatattttcttctttttctttgttctatgttcaataacataaacctggttgagattgagctataagatttgtatccttaataggcaggggttgaacaggatcatttttttttaacctggactggcacattgatgcctcatctgtgttgtgatttaatgtaaaaataattctgaatctgtgaaatatattgattttttactttaatgtgattgctttatcgacaccttgatgttccccactctcagcgtcctattaagagataactttgagaacatcaaatggtaatagtccctaggccagggtcaggaatttattgccatttctagggttgataatgggtttagcttgggttttatttatttacttacgagattggtcttgctgtgtcacccaggctggattgcagtggcacgatcacagctcaccacagcctcgaacttctagactcaagtaatcctcctgtctcatcttcccagatagctccgactatagatgtacaacacaatgcccagttaatttatttatttttatttttttcggaaagactgggtcttgctatgttttccagtctcaaatcccttgacctcccaaagtggtggggttacaggtgtgagccaccatgcctggcctagcttgggttttaaagtatagtgaggcatctggtatgggtgggagcttgtgctggtcacatgaggcaggatgggaaaagggcagggagacttgcagctagtcatggaagtgggtccatcaacaaaggtataggttattgcagaggttgtctgttataaaatgctattcttttatagtctgctatcatgaaagctctgattgtctgctctgtgttaaaaaattaaaagatacgtgtgttctacacataagatggaatatacaatggctgagtagtgtccctcagaaaactgagaagaagaaacagtggcagacactagccgaatcttgctatgttccccaaagatggtacttgccacattattactttcccctcaacccccaaagacagtaacatggcattatggtaagatattgcgactaaaacatcccggaaaacttgtccaagcacatacttagaatttcttagcaataactcaggattagtatgggattggaagggctggccgactttccattgtggaagtcaagagctcatactccataatgtgtcttagaggaggacacagaaaataaacaatggcttttcatgccatgaaataatggaaatgcattgatagatcaaacttgaatgtgcaatacattgttttctgttatctctaatcaaatacatgttacattgagacattttattagaaaaatgggttaatttggcaagactgtatccattgctaaatattgcctcttttgtacttactgaacttaggcaatagattgaaaacataaaacgttaaaatgcagtgtttatttacaaacggaaataattctaaactacctgatcatttgaggttcataacctgaaaacactttaatcacctagattctataagctgaggaattaatttatttaacaattttcaaaatactgagatatttaagagcaccaggacactccatgacatatttactgtaagaattcttcatgaagtacaagtaattaaaaactcaaagggtgtaagagacttaaagaacaatttcttctttcagagttatttgaagagtaccacgatggtgagatctgattcaggaggacaagtttaccttgattatcacaacaggcaaggtctctttgttgactggaaatacaacgaagcactttatcttgaagaagggcaaccagagacttattacaggacaggtcagctggaccattgcccagggctgtaatctataaggaatgtcaaaatgtcattgaaaggcaatgaggtggagaacatcttatttactagaactcccctagagggagaatgtgtcttgtagttcaaagggatactttgataaattaccagtggtgtggggtaaggcagaggagggggagagttgggagggtgggaaatgggagaagccactagactggatgccaaggtagcttccatataggagaagtacaggagtttactaatactctccccaaacacacacacacacacacacacacacacacacacacacacacacacacacacacacgggttagtattatcaagtgtttccaccagcaatttatttcataaattgctaaatacattttaagaatcttaaactctgtactaaataaacgtgcagattaaatactgtttttaaaattatacctttatttggattcagttccaaggtcaacaccatctcctccccgaatacgaacttagcagttcttgagccatttcatctaaaaagcacagaaacttcttgcttatcagaagcatgtctgacttccagcaaattatttttactaggagaaacaaaatactgtggtatttaccaggaattgtgatacttcatttatacacatactttatttaatccttaccatgaccatagatgacttacatatgctaagagccaggactctagtccgattcaaatctgtctgaccccagaatccttagcattttcaatgtgtttctggaaatagccttaccataaaccgcagttgcactttttaccacctaatgtgttagtgggaattattttattattactttcagttacagaaaataactaggctaagtatactgaaatatggaatacatgctgcaggaaaaacaaaacaaacaacacaacaacaacaacaaaacaaaacagaaaaacagggcacacgttttccaaaagaacagcttggtccaacattgaagtgctgttagtttgctctatgctgtggtcactgcttctttccacatgtccctttcgtttatttctctcatggaatattaacttcctttgttccttatctcctatggtagaaatatactgtccactgcagcctgagagtttctggcctggcttgactatacgctcctgaggataggaacttgtcaagtcctgttaaccctgattcccagttctttacctcaactactggcaaagatttggaaaatctggatctattgtacattggtgatgggaatgtaaaatagtacagccacttgtgaaatctgtttggaagtttcttgtaaaactaaatgtacaaatacccatataacccaacgatttcgtgcttgggcatgtattctagagaaatgatagcatgcattcacacaaaacctctacaaaaatatccatagcaggtttatttgtaatagccaaaaaccggaatcaacccatatgtccttcaagaggtgaatggttaaataaattgtacaaaatacatatcaccgaatattagtaataaaaagtaataaactaaacttggaacaatttggatgaattttccacgaattatgcagaatgaaaaaagccaattcaaaaaagttgtataattctacttatctaaaatgtttcaaatggtaacatttatgagatgaagaacagattattgattgtcaatggttagcaacatcagaggggcaagtgagaaggaaatgagtgtgagtacaaaatggcaagagagatcattgtgatgatggcaatgtttggtgtcatgcctgtgactatggtggtagacatggaaagatgtacagatgataaaattatagggagattaatacacacacccatacacacgtacaaatgaatacaggtaaacctggggaaagctgactaagataggtgggtcatatcattgacaatatcatggttgtgatactatagttttgcaaaatgttatcagtggaggaattggacaaaatgtacatgaggtgtctctatattgcttcttatattggtatgtaaatctgcaattatctgtgcttttttttttttttttttgaagtggagtcttgctctgtcgcccaggctggagtgcagtggcatgatcttggctcactgcgagcaccgcctcccgggctcacgccattctcctgcctcagcctcccgagtagctgggactacaggtacccgacaccacgtggggctaattttttgtatttttagtagagatggggtttccatgttagccaggatggtctcgatctcctgacctcatgatccgcccgccttggcctcctgaagtgctgggattataggcatgagccaccacgcctgacctatctgtgcttttaaaatgtagatcactaactagttgtcccccaaatgagtcaatgtatgaatgaatgaatgaatatttagttgcctgttaatctataagaattatgactcatcttcttttttactttttaattgatgacctaaaattacatttagatttgctagattcattcataccagctatagcaaataggggagcatttttctaatggtaatgacatggataatgtatttaacttctaacgttaatactaagttttaagggggcaactattgactaaaggttaagctagagtttaaattattttagagctaaagtcacagttttagatagatgattcccaatattaaacagatttatgaatagcataatattgttaagttatttaatatatgatgtatagctcatgatctcttaccaatgtactaggaaactacattgcccaaattctgagtcatgcatactttatgaagaattttcaagataaaggcactgggtagatgctattaggaataatgctttagagatatgtcacattacagcgtttttatgccttttacacctaaaaggaatactgttcttctgtctacagttctccaaagactcaggcccatttgaaacacattcagttagtattcaggttttatatgaacatggctgcccattgtgttataatgttatattaacatatggatataacatcaactgaaaacataaaataacaaattatactccaagtacttataaagaagtacataatctcctctttgatatctcttataaaataaaacctgcctaatgtaaacatacacatagtatttaggggtgacaggaggatgttccaggccttgcaatcatagaccttttgatcaactcagatcaacataactgaatatttaacaaccgtattttgacggttgacactaagtacacattttttccttgaaacctttgtgattcattttggaggacagtacctgaacaccaacttctactttaagctcaacctggtaagacataacaaaactaaattctaaatgtttattttccttgcttctctgaatgaatttcactcatactaaagatgtgtaggaagttgagctcatggtgttgtgtgggtgtattttgtgctttccacttatttttgtgtagctttgcgatttttgagaattacagtctttccaagtaaagaattttatgaaaaatgtttatagattgagattgtggaaataagcatggtaattacccattttctgcattctttagtaatgtcagtatttctaaatagctagctccattattctttccatgatatctcattttggagaagcacttattaaattttgcaaagcttagtgaaaatttgggtagggtcacatatgtaatatgggtgccaggataattggccaattaactgcaatgccttaagatttgatttcttcttaccaatccaagtaattgtctttaactccttagggactcctaagtggtgtttctggagaaaatacaggatgtgctatcagcacaaggcattataaggaagaactacttacaattaagttttagaccctcaaatatatttgacatgtaatttgggcagagatagtcaataaataaccagtgtgttttgactatgtgctagacatttctctggtatcagggggagtaaatatatatattccatatatatatatatatatatatatacactatatatacacatatatgtaatatatatatacacatatatatacatataggtatatatgtgtatcgaatatatgtatatatatgtgtatatatggttgaacagaattattactgcctcaaatacagcaacaaaaatgaaaaggaaattaggattgtcttattagaagggcttaaactctgatataattaattttagcttaaagtagtactgaaagaaactcttggcaagtggagtgatgtaatcctggaaatatgctgattttagaagtcttttgaatacatttagggacatgaaatattgaaggtcagaggctggtactgaaattttactgatcattttatttgtgatgatcaaagccttaaaaaaattgtgataatggaaatatggtgctgtattgggagccaacccagatgccccatgactagtgaagttatatgcataaaattatctgtatatgcatgtgcttatcattatgcaaagagtaaggcatactgcatcagaacctttcagaatacaatgattttggcaatgctgtatggaacacagtcatagagatgttctcatgttagagcagcaacattgttgaggtatttgaaaaatataaagatcatttttaacacagaaagtttactaaataataattcttaaatgttgctctaataaatagagtttgtacatgtttcagtctcttcaagagtatatgtgtgcctgtaatcccagcactttggaggccgaggtgggcaaatctcttgaggtcaggtgttcaagaccagactggccaacatggtgaaatctcacctctactaaaaacaaaaacaaaaacaaaattagccgggcgtggtggtgcaagcctgtcatcccagctactcggtaggttgaggtaggaggtttgcttgatcccgggaggcaaagattgcagtgagccaagatcatgccactgcactgcagcctaggcgacagagcaaagattccatttcaaaaaaataaataaataaacagagtaaacgtgtgtgtgtgtgtatgtacatgcatgcatgcctgtgtgtatgtgtatgtgttgtaaggtgtttgatgaagattcttttcatgaacagaaaagaaacaatattgtttagctccttttcctgcctttttccacttggatgggaaaatatataaatagtacagtaacaagagagctaaaatttaatatgagctgaattcgaatgctgataaaatattcttttataactgaaataggcactgtttaaggagcttcaaggaaagctagacctgttctttcaaagacctgagacaatatatttatcaggactttgggtctcagttttactgtacccaaggcaatttttgacatgtaatttgggcagagatagtcaataaataactagtggcttttgactatgtgccaggcactattctgggcaacaggaaaatatcagatagtcaaaatcccagacccttaattagctggcacgaggagtctctaacatctgggaaagaaaatacaacaaaaaacagaagtagaaaaatcacagtgagtaaacggagtatgtgggggaagggtggattaaaaactagagcagatgtagggtactgctgtgttttcagggaccacaattaatcacattttttcttcccttgtgagttacaaaccaactgagaaatagacatggagttggacagatggagaacaaaactttagctttattactgctaaaactggttggaaggacatgacctagatatgtggccacaatctggtgttctaatacttgctctctgagttgaacttctccatacaaaactacagcttgccccagtagcattactgtgagattagggaacatagccaaatgcattgtcctgtccttagccaggggctgaaccatgcatgcccagttccttctctctagcttatcaattatatctcatccgtcctggttatggtgaataagggggatttaaggataggtagacatgttctttcaatacatgaccttggtgaggatttgaatgaggatttctttcctctgaaaatatgaagagagtctgcttcaggttcccttaggtacaggtgggaaaaccctgggtaataggccagagccacatgacacaaattaaaagaaaagaaaatcacaaggtctttagcaaatgtctcctggttgaagcaggtagcttggaaaccttggttgaagttttgtctgttaactcagggcaagtgattatctttggcaatcataaactccccaaagaaacaaagctgttttttaaacttagaaggactagcagtgtaatgattgaaggtataaggggtatacatagcacaggataaatgctgagggtgccagggagtttttctctgggtagaaaatccagtttttgctgtcatggtatgtgagacagtcagacaagaagtaaacagtatatctgatatttgatcacaatcataacacaccataccaccaggtctttgttattgctcagtacaagcaacacttatggaaaatcaatgcttaggtaaattacgtatagtggtctaagtctgtgcacaaaccccagagcacgaagtccaaaaacaagagcatgcaagacagcccatctggcctagaaacatagaataaagattcctagtgagtatatgttaccggtacctaattaatatttgggtatacatttttatttctcagatttacttaattatgtctctgttgcagaagtgaaagtttgaaaggtgctatagaaatgaaaaaaaatcttaaaaactagtttctacatgtagcagggagaattctgaaagtggtttctcaagattcccatactttggttattcaatcagacacaaatctaggtactgctaggaagggactttgaaggtagaattaattaactcaataattgattttaaactagagaggttattctggattatccaggtggatccagtgtagtcacatcagtgtttacaagcagcagaggaagctaatgggtcagtcagataaatgcctcaaaaagtaatggcagaggtgagttgatgcagaaggggagggtggagggagtcaaaagtaagagaaagacaccaccacatctgctagcattgaagacgggaccgaaaacaggatggaggtgactttgggaagatggcaagaacacaggctgaaagctggtaggaaaatggaaacctcagccccacaaccacatagaaccaaattctgtaaacagccatagaatctccagaatgaaatgcattcctgtgagcaccttgattttggccctgtgcagacggctagctgttccatattgtgcccatgcttgtgactcacagaaactgtgaaataataaatgggtgttgtttaagctattaagtgtgtggtcatttattacggcaaaaatagagaacactttgcataaatgcgtttaggatattgttaggtagggcttacttggacttgtgagcgtggcctattagctgatccaagagctgttcaaacagtccagtgcgcagtaaagttaagttaccagattccatctagcatattttgaaatagaaataagagaattagctctcactttagaggtttgtgaccaagtatactctcagaaagctctgttggtgttcaatacggagggccacaaactagatagtgaatgtttaagttaaaggttgttgtaggcagaataatggccccaaagatgtccatgtgtctggaactggtgattatatgtcaaaaaataattaagattgccaatgaattattaagtgttaatcggctggtcttaaaatagaaagattattatataataaaaattaggtgggtccagtgtaaccccaggagtccttaaaatagtttgagtgagatataactatggaagaaaggcagagatttgcaactttactgactttgaagactggaaagaggcctctataacctggaaaaggcaataagtgaaatctctcctagaaccttcagaaaggaacacagccctgctggcactttaattttaacctgataagctgggcgcagtggctcatgcctataatcccagcactttgggagaccgaggtgggcagatcatctgaggtcaggtgttcaagtctagcctggccaacatggtgaaaccctgtttctactgaaaatacaaaattaggtgggcgtggtggcacatgcctgtaatcccagttacttgggaggctgaggaaggagaatcacttcaactcgggaggcagagtttgcagtgagctgaaatcgtgccattgcactccagcctgggcgatgagcgtgaaacaagcttgtgttgtttaccaagcttgcccaacccatggcccacaggccacatgcagcccaggatggctttgaatgcagcccaacacaaattcataaaccttcttaaaatattatgagattttttctttgcaatttttttttagctcatcagctattattagtgttagtgtattttatgtgcggcccaagacatttcttctgatgtggcccagggaagccagaagattagacacccctggacttgaaagccaccaagattgtgataatttgcttcagcagcaaatagaaaactaatgcaaaagtaaattggcttaagtacaacttaaattgtttctactcaatttaaaacatttacagtcacatgacagtgttttagtcaaccatggactgcgtatatgatggtaatctcataagactataatggaatgaaaatttcctatcacctagtgacattgtagactttattacatcatggtgaaaacacattattcatgtgtttgtgatgatgctgatgtaaacaaagctactgtgttgccagtcaataaacgcatagcacatacttttatgaatactgcatagtacttgatattgatgatcaatgtctttgttacaggtttagatatttactacactataattttatcattattttagagtgtatcttttctacttgttaaaaaaagttaactgtaaaacagcctcatgctggtctttcaggaggtatttcagatggcagttaccataggagatgaaagctctatgcttgttattgcccctgaagactttccagtgggacacggtgtggaggtaaaagacagtgatattgataattctgattctgatcttgatcctaggctaatgtatgtgtttgcgtcacagtttttaacaaaaaacataaaacagttaaaccaaaagaactttaaaagtagaaaaaagcttatagaataaggttatgaagaaagaaagcatttatgtacagctgtacaatgtgtttgggtttcaagctattacgaaagtcaaaaagttaaaaaaaaaacctttataaagtaaaaaaagttgcagtaagctaaagctaaattacaattaaaaataaaaatatttttaataaattgttgtagcctaagtgtacagtgtatataaagtctacagtagtgtatagtaatgttctagaccttcacgtgcactcaccactcattcattcagtcaccctcagcaacttctagtcctgcaagttctattcatggtaaatgtcatacataggcatattattttttcttaatttttgtactgtgttttactgtatctgttccatgtttagatattcaaatacttatcattgtgttatgattggctgtagtattccgtacaataatacgctataaaattttgtagtctaggggaaataggctataccacacagcctaggtttgtagtacactatagtgtctaggtctgtgtaagcaaattctatcatgtcacataatgataaaattacctaaggacacattttccagaaggtatctccatcattaagcaattcatgactgtatttagttcagctccttcaatgaactattcctcttatttcatccctttcatgtattatactcgacctcctaaatctatttcaattccagtaattcttcaaaatcatactcctatgtatttcataatttaatgtgcccatgaatcactttcttattatcgtagaatgtaaattctgattcaaactggggtggggccttagattctgcattttttataagctgctggtacacaaagcatactttgctatcctgagctgataagattgccacaggtggcactaaaggcataacttgttttattacaccatgctaatattgctcttgacagatatttcatattttacaaattgaatttttgtggcaaccatgccttgagtaagtctgtcagtgctatttttccaggagcgtgtactcacctcatgtctctgtgtcatgtttcagtaattcttacaatattgcaaactttctcactaatgtatctgttacggtgatctgtgatcagtgatctttgaagataaaattttaattgttttggggcaccacgaactgcactcatataagacggtgaatccttcagtaaatgttgtgtgttcctactgtttcattcattggccagtccctcatttttctccctcttctctggctcccctattctccaacacataataatattgaaatttggtcaattaccacccctacaatggcctctaagtgttcaagtgaaggaaagagtcaaacaggtctctcaatttaaaacaaaatacagaagtgattctcacccaaattttcccagggaagtcatgtgaaaaagacaagatagggctgaaagctatcctctcacttcaaacagttagccaagttggtaattgaaaggagagttttggaggaaactaaaatgtactccatttaacacttgggtgaaaagaaggaaaaacagctttattgctaatacagagaaagctttattagtctagctagaagaccaaaccagtggtaatattcccttaagccattgcctaatccggagcaataccctagtattattcaattttgcaaaggctgtgggagctagagaagaaaaagtttgaaactagcagaggctggcacatggaatttttaaaaagaagccatcttcataaaaatgttaggtgaatttggaaatagtgatggagaagctgcagcaagttatccagaagatccagataagatcattgatgaagatggctacagtaaacaacacattctcagtgtaggtgaaataacattctattggaaggagataccatctatgtgactttcatagctacagagaagtaaatgccgggcttcaaaccttcaaaggacagatgtctctcttggtgtggggcagggggtggctaatgcagctgatgactaatttgaagccaatgcttatttaccattttgaaagtctaatgcccttaagaattatgctaaatctcctctgcctgtgcatgtaagcagaccaacaaagcctggatgacagcacatagctttataacatgatgtactgaatattttaagcctacagttgagacctactacgcaagaaaaaagattctttcaaatattactgattattaattgacagtgaatcttgtcacccaagagctctgatgcagatgtacaagaagataaatgttgttttcatgcctgctaaaacaacatccattctacagttcatggatcaagcagtaatctcaactttcaagtcttattattaaagcaatacatttcataaggctgtagcttttatagatagtgattcctctgatggatctgggcaaagtaaattgaaaactttctggaaaggatttaccactctacatgccattaagaatgtttgtaatgcatgggaagaagtcaaaatgtcgttagtaacaggagttaggaataagttgattccacccttcatggaggacttgagaggttccaaattatcagtcagaatgtaacttcaaatgtggtggaaataaaaagagaactatagtaaaagtggagcatgacgatgtgacataagacttgctgcaatcttatgacaaaactttaacaaacaaggatttccttcctatggatgagcaaaggaagtggtttctagatggagtctacacctggtgaagatgctatgaacattgttgaaatgtggcaaaggattcagaatattactaaaacttagttgataaagcagcagcaagttttgagaggactgactctcattttcaaagaagtcctactgtggataaaatgctatcaaaaacattgaatcctatagagaattattttgtgaaacaaagaggcaatgggtgcaccaaactttattgttgtcttgttttaagaaattggcacaaccacctcaatcttcagtaaccactctctgatcagtctgcagccatgacgttgatgcaaaaccctccaccagtaaaaaaaaatttacttcttacatactctgttgataacttgtgtggattattattctcattttccttttattttatgcaacacacatatatgcatagtcatttagcactcttagtcctcttactatttactaaactgccttgattaaatgtcatattgtattgaatcacctttacataatttcttacatgatttttcattctataaatataaaatttaattaggtaatttctagaatcacaaaaatatccatgcagtaaaaacaggttcaataacatttagtatttttaagagatttacttttatttttcggattttttcatttcatatctgtgagaaccattatacatggtcaatactctgctttaaaactcattactatctagttatattttctataataaagtatttcttttccaatgtgtcacaaagctcatgatttcaggttatataaaggaaatggtgaataaattgcaaggaaaatattacccttctttctttcaagctaaatatgcatatttccattcagtaatcgccaacatagagagtgccagtattagatttttgtgagccatgcagtgctcttaagaatttataaaacagggaaacataaagtttgagtgagtgcaccatgcaatgttatgtgatatatagcagattttgtcagtactgtggaagcagccttgctctgaaagttcttttccgactagagtttgattgaagcacacgactgaaagagaaaacagttatattaataaaattcaaaagtcaatgctttatctcaaaacactgccaaactgcatacaatataaacagagataaaatgacatgcctaagacgaataaaacatcatctaaaaacagaaaataaagcagaaaaagcatttgctatcatcacatttcaaacacaattggagaggcctgaaagatagcccatatgaaagagaaagcaatcacggaacacagtgcatggcaaggtggggagtgggaggcccagagctctctagaacatttattatcattgcggagctcagaaagtacttttcttgtgaagccactgacactcggttttcaatccagccatataaatgtgtagcaatttgagagtcagcacagaatgttaaagacaaaattttcccccatgggtgttatcagatactgcaaagtctttaagacttgaaggtttttcacatttccacgcttctgtgaataagaaagaaatttctccaaaaaagaaaagcaattttgtttgctgtgagagttagcgaatggccctccattctgcttcagatgttactgtatttccactatgcttaagatgtttttgttttatcctaaatatacagaatgtttaaagataacccaggtagaatataaacaaatacgtagatactattcttttatctatagcttgtactttcaaatagctgtccttcaccaatggattgttttaaataattgtttgtacaaaatacttgtaatcattgcaaaagcacatataaatatatgttaaatatgtttttagaggtaatataaaaatttgcctctaaatttcacacaacagtcctcattttatatacattcattaaatcccaaataaaattaatataaagagaatattatctatacagtggcaatatttggtaaagtttcatttgtaatatatgattagcagacaaagactgaacctgaacagatgcccttatattgggaagcctattgtaaaattaatagattttaatgttatatgtagaaccattgtccatagcattcctcttagcaattgtaaaaccattaaaaccaatgatgaaatagaaaagttagttgcatattaccttaaaaattatcaactataaaagaaaagtaagagctctgcttcattatatattagaatggcatgtatgaaatgttggctcctttccaaatcatacaaaacaatttacagtttttgcagaggacttagaagtacctaacataaaagacatggaatcaacccaaatgcccatcaacaataggctgaagaaaacatggtacatatacaccatggaatactatgcagccatggaaaggaatagatcatgttctttgcagggacatggatgaagctggaaaccatcatcctcagcaaactaacacaggaactgagaaccaaacaccacatgttctcacttaaagtgggagctgaacaatgagaacacgttgacacagggcggggaacaacacacactggggcttgtcagggggtcgggagggagagcattaggaaagatagctaatacatactggacttaatacttaggtaatgggttgataggtgcagcaaaccaccatggcacatgtttatccatgtaacaaacctgcacatcctgcacatgtaccccagatctaaaaaaaatacaaaaaataacaagtacccaacatatattgtttcttttgaaggtgatgaaatttacatatacggcagtttatagaatttctcaaagctcacatcatgaattaatgtcatagttgtatctcagtgtgttaattaaatgatgctaaataacttattacaggggtcagaatatgtctgcatattttatcactagtactagatataaacctgtttattttatttaaattttagttttatattctatttaatatcttaatatttactcataaatttcacctaaaattaaagttgtaaattatgcagcaaattaaaattaaattgaatttccagaaatcacagcatgtaataatattccaaagttgatttggagtgtggccaacacaccaaagaattaatgaacatacttatctattgtcatacgtagtaatatctaaattattctaccaaaaagaaacctgcatttatatgtttatcatagcactactcacaacagcaaagacatgggatcaacctcggtggctatcgatagtggtggtacatacacaccatagaatactaggccaccataaaaagaatgaaatcatgtcctttgtggcaacatggatgcagctggaggccattttcgtaagcaaattaacgcagaaacagaaaaccaaatgctgcatgttctcacttataagtaagatataaacaatgagcacacacagacacaaagatgggaacaatagacacgggatttcaaaagcggggagagaagaagggaggcaaaggatgaaaaactacctattgggtgctacgtgcactactgggacgacaggattattagaagcacaaacctcagcatcctacaaaatacccatataacaaacctgcacatatacccccaaatttaaaattaaaataaataaaaaataaaatactttagttttggatttcagaataggcaacataaagggaaacagaaacaaatgtatgtgagttaggttgatattcattacctcagatttaattttgagtaaacacaactaagaataacacttagaaatccctgatacaattttctttgaaaatactgaagaagaagatagtatttgaattttaacacaggcagttttgttggactacatgccacaatgtctattatgtttgtttcagaactaaaaatatataaagtactaccaaaccttaaaagtagcaagaaagccaactgccctgatgagatcatagtcgacttgccttgaactgtctgaagatgtctgtatctgtgattgttattcacaaaggacagcctgcttacaatcaaaggctgtattagtaatgaagagtaataaacagtagagcttttggaattctgtgcaagtatagttgaatcactttagaaacagagctcttataattcacacactgtccatcttcacctaggaacaacacaagggtactttaacattagaaagcatattaatacatttgaccaccttcatagatcaaaggaggaaaaatatacatatgattatcgaagttgatggaagaagagaaagaatttaaaactcatttataataagaactattagcaagttggtaataatatataatcttactctgataaagtctatgaacaacctatggcaaatataattaatggagaaagttagtttacattatgtttaaagtaaggcataagacaatgttactgcaaacaaatattctgttgaacatagaattaaagatactagtaagtgctatagtgaaaaaataataagtaaagaatttaaaaggactggaaaagaaaaataatactattattgcagattatataattgatgacagtaaatcaagaggatctacaggcaaactattaaggtccattaaaatgttcacctagatcactgaatccacatttcatacaaagaaaaggtagttactataaaaacataaaagaagattatttaagttcaaataaaaagatactttttagagttgtaaatataagtcatgtaaaagtaaggttaaaaatacagaaaacgtagtcaaaaccccaaggatctaaataataacaagatatgtttattgttagaaagatcaaacataatgatgaataatttaataaaataatatgcaaatccaagtcagttccaaacagcatttcatagtttttcatagaacatgagcttccgaatagaaaatgaaattggaaatgtaaatgttgatgaatagcaaagattattttggagaataaaacgaggtggtttatttctctagcagatatgtctaaataaaagctgtattaatttcttgttagcattttaaattgtggagaaatcattcaattaataattgatagaaaattggctatctgaatggaaaaaaattgagttatatccctgtctcagcctacaagttagaaaagaagtctttccaaataagttaaagagcttttgtgagtagcacaattttaaaacttagagaaatataagtgatcttttatgattgttaagtaagggaaacaagataaataatacaactaatgacttttaatgaatttgatttcataaaatttaaaaattcctgtgagatgagaaaaatgataaaagctcagactgaaggtcaatcacaggtagggagtggaacatacaacccatgccactgataaagggttagaaagatatgcatcaataacaaaagaacaggaacctaatggagaattgctaaagaaagtcaacagagaatttatagaaaatgaaaactaaatggccaattatggtctcactagtaatcagacaaatggttattttaacaaagacattggtaaaaagatataagtctaatagcatcaaatgctagaggggctgtcagattaatacatgattaatggaaatagaaagtcatacaatttattaaatttaggaaattaaagttttacaatcatgatacattagcaattttctgcctgatatctagtctgcagaaactcttgaatatataatttgtgttgtttgttattgcagtgactgtaataacagataagtaaaatcaacaaaagtatgtttctgttagagaatagataaactacaatttattctcacaatgaaatattatatactggtgaagaggaatgaagtacctcttcatgaatcatgatgaaaaaaatctaaaaacactgagagaagtattcaaatattaaatatttcaaaattatatgttaaaaaggatacagttcatgtaaaactttaaaacacagaaatgatatgttttgtgtgtttagattgcatatatgtagactaaagataaaactcttcataggaaccatcaatattactttggagatagtatttacacctgggaggcaagaaaggagaagggatggcagttggatattagtcatatctgctgcaacttttaacactttgtttattaaataaaaatccagacaaagtatggcaaaacattgtatcttaatactgggtcataattgttgttacatttttattttgtatttttctttatgtttgcatttaattattgtttttaaacataaaacaagtaatttctaaattatatctagagttattttgtataaacatatgatttaagttactcttttctgtatttcaaaatgtatgtgtgtatgttcttgtgaaatggctttagattaataataatggtggacattttcttcttccattattttctctaccctatgctgcccacaaaacacattgaacttgcttggagatgttaatgtggtatttgaggggattttaatttatcaaaataatttaaaagtaataaaatatacctaaatgcattatcaaatgcctgtcactttaatatcttaataacctatgtttgatttgctgcattgcttgcaatagagactagtaaatacgaagttatagacacatttctcatttcatagtgttgactttgttcatgtcaaaattatattcgaaatacatggaaaacaaaatatgatagtgtctttaataagatgtcactttaacaacttatatcttaggcattatagtattaataaatactttctattgctttctttgtgttgtggacatttgcagatactttgcatacatacatttatttaatcttcatacacccaatggctcagctcttatagatgagacacatagagtcaagaatgtcaagtaagttgcccaaggttgcatagccgggaagtggtacatatggcaattgcattgtaatagttgtcttccagattaagtgcttatttcattatctcattatctcattctgcctatgaatcccttttgttcataccatattgtatgtgaatctagtccctaactagttcaataagtatttagtgaatccattcttgtatcagttattgttcctggactggtagtatggaagcgataaggatttttcatgaaccaaaaatatattagccatctcagacgtatttacaagccaaggtttttaagcttctctgaactgtaaattggtcagtgttttggagattacattaagtcttgtataaaatcaataaaaatatcatataacattattaaaatatatgcacaagaactgttctaacagatttatatttatttgagagaaacacacaagtaagaggtagttattattattctcattttaacaatgagtaatcttaggcatataaattttatggactttgtctaaattctcatattcatgacatgcctgatttggatgattactctctgtcagtagtcctgaaatgccatttgtttgcaaaaagaaaaaaaatacagaaaatatttaatttttatttatttttaattactctataatgtattaaaaatggaaagaagcaatcatttttctatattcatctcatccatattcttcttttaagttttttaaaaatcattgtctcacttttttttgagattatgatgataaaaggtgatttcggatttgtttgattttaatgtcctgtataaaaagataaaaattggccacgctgtctattcccaaaatatttattttgtttccattatgtgattttactggaccatgtattccaagcctgaggcccaaagatactaaagcactctttttcgatcaccatatgctttcatcctataagtagaaatattattctgtgatgtttcttctttcctctctatcctctctctttcccactctcatctcatcacgatgaaaaatatcaagtctgtctcattcatatttgtaaattgttttgctgtcagtagggtgcttagccataatctgtttttaagcattgtgtcaaaattgaatcatgttgccctccaaaatgttctcaggtgatgttaggaccagaaaatgggaaaaccacactttcatgagtattccgtttaagggcttataatttaatcacaaaaatattgcataaaatatacttaggtcttggttcattaacaacacttctggtaatacctatggagttcagaaccatggacagagtatgctctcctaccttctccctgtagttgtaggtgactggaatattttattatagaaagagataatgagagatatgtagacacaatttgggaaattataacgtatttccgaggacattactccagtgtgtgctggatgtgaaattttgaaaatttaaaaatttgcaaaattaacaagcaatttctggcaagatgagtgattgagaattaattattgctaaaaccctagaagtgatatattgattttcagtaagaaaatttgaaagtacaatgccaaaagtacctagttgcctaactcttgaagctatagagctgatttagtagatgagggagcagtaaatttagcagaatttttcataaaagagagatgtgcttggaacatccaaaatattacctaataaattgaacttctctgggatttatatggcagttatcccttttataatttaatgagcaaagttctgacaaaaacttacaggaatatatgtatcattatcatgtacttcctgggaaaacagtataagactttcacttttggaaaaagaaacagaatataaaattaaatataactgccaaaagacttggcttattataagtataattttatactatagaattaatgcatattattatggacaattgctaatgactctatgtattaaactatgtttcaaggacagttttagtagtttaataattgttagaaatttttaaggggcaaaatataggagagtttatttaatatatcttggttctaaaaccttgtaaaaatttccatcggagtaaatattatacagaataatttgatttgaggggaactcataatgagatattatttatggatattatgtaggtcatactgtttccaaccaaacacatgttaccttaatgtgtcattttctcatctattgaggtctaagatttccaaacaactgatgaatatctctttaaatgtaaaaccatatttgtgtatataattacctctttacataattattttacattcattttgtatgttttctgcctacataaacagcatatgctcaatacaatggcttttcttgatattttaccattataaaaaccagctttcttaattgtaatacattttcctcagtcgtgtcagttttttagctcctaactcagaaccaccccttcacattccacctcactcttaaagataattttaaatcctttctccccagttatcttgcaggaagggtgaactctgatgatacttgactcatagagaggatcagaaggagctttctgatggttgagggctgtagattcctgtcacccaagtaatgctagagttacttaaatttttaccagttatgcatgtttgcatttttcttatactcaaattatatgaagaaaatgtacataatttttgaacaacacataaatggatacacattcatatataaattaccaataaaaaacagattactgacttgtgaaaagcaaatatattaacttgttacattaatattaacaatcctatttataaaaacattgaattaaatattttttaggttttagaggaatcagttaataatcatttttgagtttcagttgtacagctgtgtttgaatattgcttgagttgccacttgatggcagtcatgtctttggcatcagaagggcagtttgcttctcttctggtaaataggatttagagtatttaaaaatacagccaatgatcttaggaaaatttaacttgttatgggaaaaataacatccattaataggactaatttttgctagatatgtaaacgtatatttcatgcatgatttttatgtgtagacattattaagaaaaagttttcaaaatattttagcttttaaaattattttctggtggaatcccaacattgctttagttttatatgccatcctttctatcagtgtcataaactgtaggagcaactcacccttgtgctgtatttgacccagacttaaaaaaattccagtcttttgacatatttaattacaaaatggtttccaaatgttggttcttgaagacctgaaaacttccatagtcttaaaattctgggaattttgcagaaaatttctatatttctacttttcctttaagatagaagaacttagttgcttttcctgaaatgttaactaattttctgattttgcactttctattttttaaaaaaattctgttatgtttgagaggtagttttgggtttttttctgtgacttccttctgtattaagtttttattttctacttggcaggagaaagaagattgatacaaaattggcaagttcttctttctttgttttgttttgcttttagttctacctccctctccaagacacattcttcacaatcaggatgaaatttgacttttttgccttggaaacatcctactgctagcagcattaaaaagatgttcaaccattcttctgtttcccataaagctccaacttttacatttttctcagtttatgtcatttaaactggagttcccttactgatgacctctcatagaatatgatttcatttttttattttaatagtcaaaaatatatgtttcttaactccttagaagcaatagagtatttttaatttgacatgccattttctcttcatatagacattttaatcaaattaattattgaaatgatcagctaataagatactacaaaatttatattgtttagataaaaatgatcatattaaatatttattgctgtctggaaaatggtactgaatgcacttaaatttcaaaacttgttttaaggtatattgtgagtacaaacgatgttttggcatcacccactatagatacaaataacatgtaaaacacaataagttgtatgtcagcaatgtctaaaaatgctgaaattcaataacgtgtttccccacgaaagtagtaatttgggtcataatatagtttctctttgctatctaagaatatcaataaaaattaccatttttgtttggtcttagaatagaagtaatagagtgaaatctggtgataatattatataccattatcaatagaaatacctaacttttgaaagaagttataatttttatgtcatgtgtgatggagagtccgtttatcagtaggtatatacagtactctatttaagagcgtataaaagttcataatttttacatttacaagtgctcaattgtcatatactccagtgacaaagagtgtatttaaaatactcacagagattttactagtattagtgtaaggaaaatttattaatattggattgccacttaggtgaaatgtgtgagggatatttctgcactattttatctgtccattcattaacaatctacaatgcactagagcagcaccttgccctggaagtactctagttaatgcaggagtaaaataggaacccttcactcatgaactttaagtctataaaaaaaaaagtagtaaataaatggatacatatgtacaatgctaggaaatatacaagacactatgtgagcacataatagatgcatcttgcttagtttaaagacaggatcagtaagactccttgtaagaatatatattaaatatacacttacattttaattaaatggaaatatgcataggaaagaatttaaattaacttagaatgtgtataaactcttttcttaagagagtgttgaagtatcgatttatttccaaataaacattttctgtgttaaagtgctcagagaataaaaaatgctgattttcaattttataataactttatttagtgaggacttttctcatttgcacattatccgtggtgtgaatcatacatgcgattgttttcccggcattaatgacctcttaacccaagcttttcctctgagttaatgagtgtctggagcagagggagcttttaagcagagtagaggactcttgatccatatgatcattaccttacgagaaatgcctgaccaacaggtcattattgctgttaccgtgctgagaatttaaatgaatgatgaataaattgttcagtagattctttttcaattcaagtagatatttagtaataagcaaattgcagctaagggtattttaattccatcttgtacatttatagtgcctacttttataatggcataatgtctgctataatattttgcagttttaaaagtgaaacatcgtagcaaaatagttttgaagttatttccatatgtccatcaggcaagtcagaatagggcatggaattcaattatttaagcaccttttttcttaggtaatcttatggcaggtacacagttaaaacattaaaaaaagtggggagagagttaacatgaattttaacatgctttagtaagaaagatatttttataaaagcttcatatctttgctttttaaaatcaattcaattttttataagaacttaatgaaatgagttacattttatattacagcttttggcaaggaagaagtacttgagattgaaatgttacaggaattttgcagggaaatttaagaaatagttttatttatttcttctctgattaaataatatcaaatttatttgttatgtaatatatgtaaattaacgtgaccagcattcgaaaaaatatgtaagtaggtaaacctaatccacttcattttctcaattcattatatttaattgattaattacaaaattctccagaaatacctaaaattataaactgaaaacgctatagttcaagtagtcaatctatcttcaaatcagttaggaccttttgtattgaatataacagaaaattgaaataaaaatttcaatttgatttatatagtgaacagaattacttgactcatctaactgaaatgcatagaagctgtagatgaaactttatctagcacctcaaactcagcagaaaattcactcctccatctgtgcacaattgttgaccaataccctgaattcagatctcagcttatgggtcaatgccactaaagactcatcctcaacccctgtctttactgaaatcaatcaaggccccttgttatatgtcctcagagaaccatctattgtcactattacttactgttagtattattagtagtaatatagtcattacatttcataaccaattatttccttggttggcatatgaaaggcatgtaatgtgtacttactgagttaatgaatgcttgaatgaagtcaagcacccattaccattcttaactcatggaatgaccagggacataaataccctgaataatgttcctctctcttggccttgtttagtgcttgtcatttcatctctgatgaaattttaccctctatgaaacttccctgattatccaagcaaataaataaataaataaagcgcttcctatctaggaaatcccaagatgttatctctgtcttttgacattgatcataatcataaatataatagagtaatttctgctaacttatagtttgaagaacaaaaattgtgtcatttttccctctattctccatggtggagaattcgttgatatcacaaccatcaataaatatttttaagttaataaactaaaagaaagttatgttatcttttattcagtgttggttgttttaactgttttataactatcagtttctttgtaatttttttttgcaaatgtgaaagtaattttatggtgatttgtgcagttagtggtctgcaaaattgtatttaatcaaatttgtgcaaattataacataaaagagtagcttcttttaaaataattatcctctgataaataataaatacattttcattgcataatagtctccaaatatccattcgtaaataaagtgagataaacttgggtctttttatgttgcctagtatttaataaacttttagatacccattaggtaacttcataggtcctctctcccatgagatagattctcagagaaatcagtacatatgtgtgtgtgtgtgtgtgtgtgtgtgtgtgcatgcacacgtgtgcattttacaaataaaatttggagtcttcatgctttccctaatatccacaatatcactaggaacaaaataatctttaagcacttcggcagagttggacgtttaggatagaaaactagagttatgtagacaatagtgtttcattacaattcctctgtcacatttgtctattttcaacatttttctgtctttttattttccttaaggccaaacctgctaacgttagacttctgctccttatttatgtttttatccctgctttctctgcttttcagatcattaattactgattgatatttaatcctatttctggaggcacatggttggcattttcatgagaatgaacagaaagaatacaaatataatcggcatgactacctaattccataatcctttcattagtcaggcatcccatttagtagagtatttaatcctgcagagagccctgagaaatcagctcatattgtcactgtggtttcaatttttttaaggttccatatcattacctcttctaaggaaaattctacctagctactttctataattagctctgtcagtaggtaagatgaaacgtaaaactctgggcaggtttaaatattttatagcaaattgtagtataattatgaacattgtgagtactattttctctttctgtcattggaactcagagataaaatttttatttttctatgaattaggaggaaaaaatgtttctttaaatgatcttttagcttacctttcagcctcaagattatgtttaaataaaggatttatatcccagattaagaatttctatttcattttatttttccctcttatgaaagcacatgttctattggacagttgaaggtttactgtttttcaaattaatttgagacttgtcttttcagaaattttagtaaaggtaaattcattttcccatagctatatttcctaataaagggcattaatgtaaaaaaagaaagctaatttcacaaattatatagtatagttatggtttcagtggaatttcttaaccaatactcatatttagcattacttggtagttttatacttgtaaaatgctgaattgcatatactaaaaaaaaaatgatacttcctttaaagaatctttcatttctttgttaaattttgtccagggcattgtaattcttttttttttttttttttttttttgagacggagtctcgctctgtcgcccaggctggagtgcagtggtgcagtctcggttcactgcaacccctacctcctgggttcaagcgattctcctgcctcagcctcccaagtagctgggactacaggaacgtgccaccacgcccggccaattttttgtatttttagtagaggtggggttttgtcatcttggccaggctggtctcaaactcctgacctcaggtgatacgcccatctcggcctcccagagtgctgggattacagggatgagccaccgcgaccacccaaaacagtattactgattttaatttgccttaagaactgattattagaacaaaaataaaaagctaatttgatttatttcattgttttcatttaaaataatacatacatttatttgcttagccaaacagtatttatctaacattattcactggaagtttgacagattgcattacttgatctggtgaatgaaaatgtatattctgaacatggaaattacagaagcccaaatatattattacatatacaactcagaaaacagataacgtgaaatcataaagatgttcataacagtgaacatttagtttggggggaaattaaatttaaaaatatatttttatttttaattaaagagaatatggtgtgccaatactcttttcttcttaatattagtatttgttaactcaggcctacatcagagcacttttcaaaagagttaaagcatgtaaaaatagaatcactggtcatttcggtaataaatattagggcgattttctttcttgtaagtaataaattggccattttctaccgacataatcaactagaagttcaaagagttgtttacgtcaatttcctggggttgcaaaatggcagctcctcaaatatgtattaaaatactgatgaaggcttcaatcacatggcgtaatcttctcagagcaattcccctcagtgggtcattacagcagataatggaagcatttgtaacctctagatacaattggactaaatgaaattagattcccaatttccttcagataagaatatttcaaaacgttgtcagcatttattgagcaataaacggggggtggggttgacattgtacaaagatacacagagctccctcatctcctttatctttgcctctagaatgtttattctttaaattaaacatttatgcaaacagcaaaatcagatgttgggcaagcccaatgctaaaagggttggccagaaatttttccctgaggcattggcaacccatattaaaaatatatataaaatgtttccgtgtggaaaggcagagagcgcctcccaccacagccatcttcaggcaatgctcatccaagtagacatctagagcagaacattttaaaagggaaaatatgtggcggatgcaggagacaggatgcaagcagtctgatgcccatcatctatatatagggtatggctctttgtaaccagcaatgttcataaaaattatctccctttaaagatattaccaggtattctggataatggttcaatgttagggtgatattagtaaaagtaaggctttctattgttaaacattgaatttgaaggtattatatacatcacctaattattaaaccctcctttaaaacttttagatgatgtgttcatggtcatggagttagtggccattcagtaataaatgtagacactgattcctaaaaggtggaattttttttttctctgctcttaaagcacattttatcatagtcagtcttttcaaaaactaattatgaagactgtacctggaggacaggtagacttaaaagtaaaattccctaatatataaaatatatacaccttaaatacagatggactagcattttaaaaattgaggttgggattcttttaaatcttgtgtctatatttatataaatgctaattgtgttgggtaatctcaagtatgttttttccttccaaaggatacttggctcaggaaaatcaatctctttctctttctctgtctctctccccctctctttgtctccctttatgtttctgtctcttaagcttatacacacatacacaatatgacaccatcatctacaaaataatattatcacctatcttctgtttcttctagaagaagttgtgtttgaactaaacatatatttttagtgttgtaaaatggctctactgaagaaatgttaagagcaagatttaaactaaaactgttttaaaagggactatgtcaaatgcccaacagatttctttcagccatttttggattgtcatgtattcccattggtggtggcatacattcttaaaaagtaatgtgccaaagcataccatattttctcaaaattttatagagttttaactactgaaacatttgcatgcaaaaatatattatataattttgctaaaatgctaaaaaaaaaaaaagcaaaaaaagctacaattttgcacaaattgtttctgagaaaaaagatggattcttacataagattattggatatccagccaaagggaaggctacgtcagttttctgtctctttaccagagagcctcatggtgtggtggaaaaggcacttaacccagactctggttctgactccgtcattaattacccacgttgtctctggagaaatcccctaacttctttgaatgacaaattattcttctgtgaaattttgaattttctaatagtttattaattttatttttatatctaccatctcatatttttctcacatcaaccccagtgagggatttggtgaatctccttgtcccttaaaatgacactgtgacctggttaagtaaaaattcttcaggatttatagtgaatttaggcaatttacttaccttctgtgtttcaattctcctctgaaaacaatggggataattatatatatctcacaggattttgaggattaattaatatttataaaatgtttagaacagtctttgggacaaataaatatttcaattattattgttgatggtgttttaagaacatcattattgttagcagtatcatgttatagttaaaattgcttggaccttatatgacaatatcttatatgacaatatcatagtgatttgatggaagcaaactatatatggcatctgaatgtatcttgaagactataatattctccatttgtaaagtgtgatttataaattcagcatacaatagtatatgatgcaaacactttcaattaaaaacaaaaagtttttggacatttagaatgtcaagaaaagaacaatgacaacaaaaaaatggctttttaaaaatatattgttcttttggaaattatttctactcattgaccttaaaaaaagataagttcctgatgatttatcaatgaaaaaatccttgtctaaattattctaaatgagaaaacatacagtattttcacagtttatataggctgggtctttttacattaaattctaagttctcctttgaattatatagcatataaattgttaacttctgtattttataaattatggaattaaatgcatataagctatttaacttggacaagctcattgaaaatatgtgatggagttcaggctgtagcccagatttattcagtgtaaatcacatgtgctttaccccactgcagtagggcagatggtgaagaggggtctaatggcaagcagtctaggaaaccttgccaactccattcatgtgaaggaactgccaggttgtaaagggcttattccaggtaaattaaataacagaaaccaaggctctgtttttttttttattaataacataatctgagtttggacaaaaggctgcatacttctgagttccatgttgaccagggtctgcatagagaacattttggttttgatcgataaaatttgatggtgagtgttcaaaaactgtcattatttggttagcttctacactaattgatagtacaagtaggaagaaaaaatattgctcattataaaaattggctctagctagaaatatattttgaaagcttgcagactaataatcaagtaaaaattcagaaaatattaaaataatggatctcagaataagaatgtggaaagtaaatcattcattcagtcagccattacactaaaattgtcaaatacctattaaatttctggaattacattaagtggtgaaatacaaatttgatatatacaaagtacatcgacaaatgtttaccagttctttgttactaaaaaagaaacctccctattgtctgtatttttaatttaactttttatctttcaaaaatattttaattgacaaataattgtatatatttatgtgatacaacatgctttgatatatgtgtacatagtggaattattaaatgaagctaattagcaagtccatcacttaacatacttatttttttgtagtgaaaacatttaaaatctactttttaaaacaattttgaaatatgcaatgcattcttatttatcatagtcattctgtacaatagattgataaagcttattcctcatatctaactgaaacctttttatccttttagcaacatctcctcgtttcccaatcacctgtgtttctataactctggtcatctccattctgttctctacttctatgggttcactttctaagattctaggtgtcagtgagatcctgccgaagtagtctttctgtgcctggcttattagcattatggcctctagctttatctctgttgttggaaataacagaatttccttccttttcagctgaatagtattccattgtgtatataagaccacattgtctttatccatctatctgatgatggacacttagtttgtttccatatcttaactaatgtgaatcatactgcaatgaatgaatacctttttggcatcatgttatccatttctttgttatttgttcttaacatttaagtaggaggaaaagcttttggaattgctatgaagggaaagaggtatatgggaaatgcatcaaagcagaaatgacaatagcaggagaaattattgaagaaaacatatagggaaagataattattctctgtgtattttggactctcttatttcaaaaaataaaaccagatgaactttcagctaaggtttcataaaataattaaattaataattcatacatagaatgtagagatgaagcagggaatcttaaaagagacacagaaaacccatagggcaaaatacttccaacgttttaagagccaaagaaataatataatgtcagtgcaggcagcagttgcatgaaactcagaggtttcagtattgtcccagaggttcagtatttctattaataaagagcaaaagtcttagaactatgggaagaaataatttagaatgcatagatatgttctcaggccatctgagaatgagagttacaccttgaaaaaagtcataaaatactattacattttttgtaggggaaatattatagctcataaagtttagcagaggttcagttattactgattgaaatgtgtttggtgctatattaccctttttggggttttgggttttaagaagtacagacatgcttgggctaaccagttgatgaaaatttatttgacagttaagagatgtcgagaaggaagccttcaaagctgttgcccatattgcagttggctgactttggctttggttatgacacctggttctgatagttgtgcccatggtggcatgcccaccatcacatgactatctagcttaagaaacctgagactattcctctaaaaagaagtctaggccactcaaatgctgcttagaagatggacgtgttccatggcttccaaatccatattgcatccactagaacaggtcctaaagctcacacacatctgggagccttatgatggaaagaatagatagagggttgtatcggtcctattcaaggaaggtcctgttcaaggaaagtaagatagagttgatctttaacataataaaaatatgaggaagataaacagccatgattctagttactgtatgcccataaggatcacctggagaatgctttgtaatgattatatttgttccctttaattatgagtcagtagatcagggaataggacccaagcatgggtaaattttaagagcttccagtgtaatctaatgtataaccagaggtgatatccattggtccagtttaggaaggatgtttgtttgtctaagtaactgtaataatgtgaggctgatttaggttggtggcaagtccttgaacaaggaacacaggccatcctcttttattcatctcctaaaagttttgactagctagccaaaagaataaaacccctttactataaaaggaaaccttttgttgctcccaagaagaaaagaaaaaaatagaagtaacaagaatgtcaaaacccgtagtaactggaaatgtttatttagtataaatttgatgaattgtagtcaaatacagtacacaatttatgcatattctaataaacccatcataaactctcaggtaccttggtgcctttccttcttaaaagaatatgaaattttgttatcgataatacgaagttttcacccaaaaattaccttaaataattttgtttttatttgaatttatcatatacgttgtatattaaatgccaaaattatatataggccacagttaaaaaacaggccgagtgcggtggctcatgcctgtaatcccagcactttgggaggctgaggcagttggatcacgaggtcaagagatcgagaccatcctggccaacttgatgaaaccctgtctctactaaaaatacagaaattagccgggagtggtggcaggtgcctgtaatcccaggtactcaggagtctgaggcaggagaatcacttgaacctgggaggcggaggttgcagtgagccgagatcgcgccactgcactcctacctggggacagagtgagactctgtctaaaaaaaaaaaaaaaaaaaaggacatacggtattacagcacttcaatgtgatatccgttaacttcatttaatatctgttttcccaactgcttccttgaattgaaactgtaacacacagaaccagaagtccgaattcttcaaatcaagatagacataaaataaccagtattcaagggggtatacacactccaaggactgatgtgaggactgagagtgttgagagacatctgggatcactccttacacatttcttcatttttctatgtggcggccgtaccattcatcaacactacattttatgcacatgcattcctccaagcttttgctattgtgtttgcataggtacctttttttctctatatcactcattcttcattcagaggtcaactattatcaacttctctgtatgctacactcgccatttccatgcgtcagataattaatggctaactcccttgtaattccacaaacttttctgtcttaccacattctatgttcatatgtgagtgattgcatatgtgttcgacccttcttttgttttgtttgtaagttgcttgataacatgggcatcacttttccttttggcataagcatcagttttcgctgtccttggatgtacatgggaagttgttttctcacacagacagaaaagtaatggcatccacctgcagtggccagacgtgtccactcaggaagattgtcaggaagacccatgaagataatgtgggtcaaggtatctccttctttggacccaaattgcccgaggttgcctctttaaacatgtgcctaaatatttcactgcactgattccccaaaatcatgttgtaaacaccaaagttcataaactgtttgtttcataattttatttctcagatactttttcctaaaaccctcagttacattatttctttctttcttccctgagggagaggaagttaggtggatggtagatgatagatagggagatggtagagagataaatggcagatggttagtgagagagataaggaagatgaggataaggaagagaaggaaggaaggtaagtaggtagataggttagatatgtgttgatagacagtagatatggttttaaaatatgtccataaattttggatacctgtcttttcaagttaggaagtctaatttcctccactttggtgtggattgtacttaatgacttacttctgacaaataaattatagctaaaatgacagcgtactactttgaagactagtgataaaaggtactgagccttttcctcccttgctgtctcttggatccctcaactttggggaagttatctgccatgccactcaaccagcccatgaagagtctcatgggaattgaggtttcttactgccagtcatgtaagtgagtgatctgggaagtgaactgtccaaatgatatcctgactgcaagctcatgagcttataagatcctagccaaaaccactcagctaagccactcctgagttctcgatctcggtaaactatgaggtaaatatttgttgttttaggtgattatttttggggtaatttgatagcagaaatagataatatagtggatgagagacaaattgatagatgataaatcagagagaagtagaaaaattaaaatataccaatatatttgcatacaaagagatatgttattacagaaatatgtttgaaaattcaaaaacgtatgtaataataaagtgatagttgttattttatgtaaattaattttgccacaaatttgaggttttggtagtaacaaattgcatataaatctgtgagcttttattctctatttcatctttattgcagtttctagatattcttaataatcacattgattgaaaataagcaaaataaatccatgaaaagttatctgttcaatgtaattttctcactctcaatatttggttcaaattttaaatttaaacatgcatttttgaaacttttcagaaaactgtcaattatatttttctatcttctgaagtaccgtggctgtaaatgtactgtatggatgggaagactaaggcaacatagctagtgagtggctagtatgtaaattatgggctagcatgtgaattattgaacttgcactttatcttgaataatagcatttaacctactgggtaaacagcttcccattgcactgtctctgtagtctgtctcatagagtttaatatgtttaaaaaaaatttagactaggcgcgttggctcacgcctgtaatcccagcactttgggaggctgaggcgggcggatcatgaggtcaggagattgagaccatcctggctaacacagtgaaaccccgtctctactaaaaatacaaaaatttagcctggcgtggtggtgggcacctgtagtcccagctactcgggaggctgaggcaggagaatggcgtgaacccgggaggcggagcttgcagtgagtcgagatctcgccactgcactccagcttgggcgacagagcaagactccgtctcaaacaacaacaacaacaaactttaattaaacagagggattttgcttgcttctagggctgtttcaaggaaatctattaaagagaaacgaaatacaaaattaatttctgaaattaaaagtttaagatctcttttatcttagaatatctgcatttcactaattatgctttgggtgaatgaaaatctatctaggtattcctaaaattattactgtgaaagtgaaatatagctaccctataatttatgctgaattatttttatctcatcaggaattttgtgttggatgaaatgagtcaccctgtaatcacattgtttatcttaaccagtgtttgctttagatagagtcatatttctatgtaattacagtattacgtttaaaggtatgaagaatgcacacttgtttctactcacatctgctttatttttattgtccagtacatactttttatgattttatcataataggaatcaattatcatagtaggaatcaatttatctgaatgaaaatatttttctactaatgctcatcactgccagtagaatttgttttcctgccttctttcctccttctattcctcgtccttttctcctttcccttcttccttctttctcttcaattcttttaatttatgagtttaaactgactttaaattcctgtagttggggataaggcatatacagaggacagaatgtgagggaagaggcacttgtgcatgtgtgtgtgatatctttgagtttttcaattcaattaaatagacaataatattatataagtatgtgtataaataagtaaactctacatgtatatggaattcttccctgaattgacaaaaaagtattatttccattttatagatgtaaatcttcaggaacaaaaagtccaattgacttgtttgtatgcttaattcttctcagagcttatttaaaaaaaaacatacagttatataaaagtaacccgaattatgatttccaatctacttttctttctatttatttgatgaattaaatgttaatattccctcatcatttaaataatttcattttgattatcattaaacaattgagtaaccttacttttcttcctctttataatcttccaatgttcttttaaaaaaaattccttgaaacacaggaaaaaattgtcacatcttagtctttgctctcttgtgaaaaaagtccattaagatttatgaatttctgcctgtaatcccagcactttgggaggccgaggcaagcgggtcacgaggtcaggagactgagactatcccggctaacacagtgaaaccccgtctttactaaaaatacaaaaaaattagctgggcgtggtggcgggcgcctgtagtcccagctactagtgaggctgaggcaggagaatggcgtgaacccgggaggtggagcttgcagtgagctgagattgtgccactgcattccagcctgggcaacagagcaagactctgtctcaaaaaaaaaaaaaaaaaaaaaaaaaaaaaaaaaaaaaaaaagatttatgaatttctttctttggcaaagtgctttgctctcacattaagggcatagactgattgaacttgcactttatcttgaataatggcatttaacctattgggttaacagttttgaggctcccaaataaatgtccaggtatctgctgaattgtttgactgcctgggttataaaaatatcttgaaggtcagataatgctaatgtttgagaaatgcattttttatccctgatctagctttccttaccaattatgaggtaaaaatagtaataaaataataataatgataattacactgttaactaatgttacctagaatctaaatcaaaaagaatgattttcccaatatccatgatcctttcctcagttacatattccagtcttctgaaataggattccacaagagaattaaatttatggaaaatgattagagtgattattttcacatttctctcaagcatgatctttagctaatacaattattgatgcacttgagaaaagttactacattgcatacaattcagcactgaagcttaatttttacatagaactgtggttcataactgctggaaccccaggatactgaaacaatacccacctgccccaccttgctccttacccaaccagggcagttagttcgagctcatcattaggatgagctccatcttcaggtttattataaacatcttttcacatttctgaaatttggatgtgtcttacagccaccgtgtacttcagtcaagtcacattttctttgtttcctgacaaatttgtgctaagataatgacctgccttacaataaatggcttcttagaatctagtactttctttagcagacaatcagcacccccacaattatttatttatttatttgtttaagtattttttgtctgttctttaggtcaataatagagtgtccctacaaggaacaagagattttccacagatgaaaaaacagttgttaaaatttaatatgaataaactgttcatagtcaagttttcttctattaaattatttgaatctatgaatttttctatgagattagactgcggtaaaatatgacgtctgatttagcacatccacatgtatttaattgttgtaagagtaatgaatgaagcataccaccaagtgtatcatgcctctctctggtctggcatttgaatgatttcaagaaccactgccctcaggtcctcttttgtgctgtttgaaaatgtgcagtaataggttcggatagactaatctgtgcctaagtgatagctaatatatcttcctcccaggtagtatttagcttgattaaaatggacaggtcaacataaggcatttctagtgggaatttcaagcaccactgaaagctaattgagcaagacaaagcttataaagaagaaagtgcacttgagttaccaaaattctaactggatgctagaaaaaattgtatttgcattaaatttgttacaagcactatggtccttctcaactcatgctctctagggaggtgcgtactttacctatgagtttaatctcattactcgttagcaaattagagaaaagttgctgttgacatgtcacataatgcaaccataggtgctgtgtatttacaaagtttgcatttgatggacagagcatttcgaggaatgcataaaaatatgattaggctattttttctaacaataagcaaagaaattataaatatatgcaacacatgggtcagtaagtctaaggcttacacagactgcggaaggtaacaattattagtgaagagaccaggtggagacccctgcaaatctaagtgtgaatggtttcgcagaagtcatatgtttttttcaaattaaaattcatgtttttaaaaaacaacgttgtgggacaaacaaaacatttctactagtcacactatatccacagatttccattttgtaatctatgacagaaaatttcaactgcaaactttcacttcattatgaatatattataaagtgtattaaatttcatccagtggtaaaggatgatcctggaatatgtagaataagtatttaacgaatttctttctggtccacttgtattttattcatggaaaacagttttgatcagagatgttcctctgtagctatgctaatattacatgatcataattgctttttgtttatgagattatatgtcctccactagtgcagaaccagatgaaacttaagtttaacctggcatgattatttttaacacctggcttatctattctctttcctggggaaaggattaaatgtgtcgtgattttttttccttattgattataagtcattagagaaagctaagtgctctttatctaacataagccagaattattattttattttattttattatactttaagttccaggatacatgtgcagaatgtgcaggtttgttacgtaggtatacatgtgccatggtggtttgctgcacccatcaactcatcatctaggttttaagccccacatgcattagatttttgtcttaatgctctccctctccttgccccccaccccctgtgttgttcccctccctgtgtccatgtgttctcatcattcagctcccacttatgagtgagaacatgtgtgctgattttctgttcctgtgttagcttgctgagaatcatggcttccagcttcatccatgtccctgcaaaggacatgatctcattgttttttatggctacatagtattccatggtgtctgtgtgccacattttatgtatccagtctatcattgatgcgcatttgagttggttacaagactctgttattgtgaatagtgctgcagtaaacatacgtgtgcctttgggaatatacccagtaatgggattacagggtcaagtggtatttctggttctagatctttgaggaatcaccacgctgtcttctacaatggttgaatatcctttacccactttttgatgtttttttttttttcttgtaaatttctttaagtttcttttagattctggattttagacctttgtcagatgagtagattgcaaaaatgttctcccattctgtaggttgcctgttcactctgatgctagttccttatgctgtgcagaagctctttagttaaattagatcctgtttgtcaattttggcttttgctgcaattgcttttggtgttttaatcatgaagtcattgcctatgcctatgtcctgaataatatcacctaggttttcttctagggtttttatagtttggggttcaaaggatatgaacagacccttttcaaaagaagacattatgtggccaacaagcatggaaaaaaaagcttaacattactggttattagagaaatgcaaatcaaaaccacaatgagataccatctcatgccagttagaatggtgattattaaaatgtaaggaaacgatagatgctggcgaggctgtggagaaataggaacccttttacactcttgatgggagtgtaaattagaattattcttaacaagataacaaatgtgtatccctgaatcaaactttatttgctgtataagctatccaaatatgcccttaaaatataatctttattatataaaattatatgatacaatatataagatatatactctcctttattatataaaatataatcaattattataacccatataatatatacgatataatctaatcaccttcattatataagacacaatctagtcaatcaattatagaatatgccaaagcacctgagagctacgaaagaaaatttttcaaaactgaaatcaaaatgaaacaagagtgacatatgtagagctgcttgatgctgtaaacagtaatgcagttttatatcaagcagctaaacaaatgaagctatttccacacccgtacactcttactacatttttaaacacttgagaaattatgctggataaaccagtagccaaaataaagtaaagtgaaaatgaattcatctcgtgtcaaacctccaaaactgttatttttctttattttctcctgtctactctccctcccctgatttccttccttcctgttcttgcagggacattgctatcttaccactcagacaagtcaagccttacattttatgtctcacatatatattgatgatcatctcttttagtgaacatccgaagcattatcataatcttactccagattgtcaaatctcccagcactaaaagctaatggaaaactggccatttttctcattccatgtgttttttattttacttttccatcttcccttttctctgatcttgatttctcaataattagaaaccgacatcattgaactgcttcttctaaagtccttttacaactctctgccattattactgttatccttctttttacaactatcacactttgcttatgcacttctctcacattctttcctgaatatcaacatggatggttatgtttcaagtttcctacgaaattcattaagcaatttgaatggaagtgggttcattttggtaatttttaatagtattgagaacaattcctcctttacatggtagttcctcagtaagcactacttattatggtctgaatgtttgtcttttccaaattcatgtgctgaaactttattaccagtagtatagtattaggtggtggggcctttgggaggtgattaggtcattggagcccttataaatggaattggtgcccttttaaagagacctcagagaactgccttgccccttccacaatgcgaggacacagctagaaggctccatcaatgaaccagaaaacaaacctcaccagaatctgtgagaatctggaatacctgaatctttgacttgccagccttcaaaatagtaagaaataaatgtttgttctttataagcaacataatttttggtaatttgttatagcaggccaaacatactaagacattatttggatgaactagcctaaaattaaccaaaatttagaaatggtttgtttttacactagaaaagtattcaaacttaaaatgcttacgctatgaacttgtagatatcagggaaatcgcttaaacacttgagttctaaggcccagtaggtaacgagcctagatttcagacacagaattactagtgatttatatgctcaggcttttggcatcagacctcagtgaaatatccttgattttatccgagtatacaggaattttcaaaatgcagagggattataaaatttaagacctatggaggatgcccaattttaagaatcaaaaaggagaatataacaatttgtcaaaccaaaaacttacaccagaaaataaagtaccaaaacaagggtacaatctcaggagactgaaaatcaaggcagtaaatattcattttatttagtttcatttgtcttatttatatttttgtctcagcttagtatcaaaagccgcacttagcacatttagcgtattattccttttatttcttagacagaatttataacataaatgctactcatctgccacttggcaagtgaagaatctgaaactgaaaaatcatgaaatttgactgaagttacacagctattaagtcgcaacgccagcctatctactcaggtttgttgttgaaacttgagcttttaatcactcataaccctggcttggaaatctaggtcaattgcctgcaatagaagatgttctttatagcttgaattttaatctgctagttaagtcgtgtttgtggatgatcagaaaatggcatgttgatcaattgacacacttttctcctcaagtttcctcttcttccttcttctggagcattattttgaaaaaaggtgaactttaatgtctagaccataacaagtcgtctggaccataatcttcttaccatgctaatggctgaagttggccctatgatattatgaagctcatttcaccatttcctttgcacattctagttgtaaagagctgtaatggaacaggatacttctaaagcaggaaaaaatatgcatgaagtatgtgtaggggtgttagaataagaagatcacctcggcgatagggttataggccctccatttgtggcaaggttgtttatggcacaacagatgtgaatacaggcagatgttacatacgttatttctaacaatatgtacccactggataatagtttgtgtgtgtgtgtgtgtgtgtgtgtgtatgtgtacccacatagcatatctatgtgtgtgtgtgtgtgtgtgtgtgtgtgtgtataatgtttatataatactgaacgttatcaataattttttgcatcaaaacagatttgggtgccaaatgatatcttggatagaatacataccaagctatcagaataatattaacaatttgggaagggcacaggttaaatgtcgggatctcatggttttttgaaggttgggatcgtagtagccctttatgtcttgtaggactgtctgtggtcttagcactggatcagagttatccccgagtacgttggagtacactggaacaggccttagcttatgagtagcttacagacatccctgtgagctgtgctctatttattgaagagactgaaatgtgcttctcatgttgcactttgttaaagactttgcctcccaggatctaaggctgcccgtttaataaagcagggcttcaccttctgtgaaatctctaagctgtctctgctcacttctgcctctctggcaccattgccaggtggaagtaatccattgctgtcattatactgtatcctttagctgatagtgtttctgcttctgtgatgggagccttttggaagtgtttgattgtaaaaatctttcaaactgttctgaagaatgctgtatgttttcttaatttcataacactaaccaattcctaatatataatcgacttctcatatttctttgtctcccagctactagaatgtaaatttcacagtggcagagttttccatcttttgtcttgacaaaggtgacctaactgcctaagttcctctaaatatttgttaaataaacatggcccaacttagttggtataggctgagatgtgccttatctactccaggctgtgatgattaggtctaagagtctcagagcaccagagtcccttggaaattggctctttcctcagaatacagcttcattctgtccttggtgcagcttgactgtgacctcaacataatctctgattatgaccaacaacatagagaattatggtagtaactgcctccttagtgtaagtccatggccctgcctaggcccatgttaaaagccaaatttcaataatgtagtgtatactgggttaggtagattagaatggagatataaaaaataatatttctggctgggcgcagtggctcacgcctgtaatcctagcactttgggaggtcgaggtgggtggatcacctgaggtcaggagttcaagaccagcttggccaacatggcaaaaccgcatctctactaaaaacaacaaaaattagctgggcgtggtggtgggcgcctgtaatcctagcaactagggaggctgaggcaggagactcacttgaacctgggaagcagaagttgcagtgagccgagatcacgccattgcactccagcctgggcaacaagagcaaaaaactctgtctcaaataataataatgatgataatagtaatatttctaattactagcctagtatagacactactggggaccaggctactcctgttcgttgcctgtagatgtttattattttagctggatggtataagtttgatgatggactgttcatatgttcttgcaaatgcagtgaactatattacacaccattaattataagtcttccacactcagattctgtgaaagtccccctaatttgttgatgacataaagctccacctctacaatcatatgccttttttaaggagtgtcatgaatccagatactgagatcagggacttacataaggccaactaaaaaaaccctttacaatgtattttacatatattatagtttgtaagtataaacattcaactactgttaatggacttctaagagaagtcgagtcatttctgtgtgttggaacctcctgtgatcatcatccagaggaagtttcatatacgctggaaatccagtttcataaaatgttacctaaaatgtaatgacctcaaatggagtgtactcagtaactctagaataggaaggatcttctgatctttgcaaagattgcagaggcgtctctgatgagataattgagttccttcctctgattttctgaattgaacctgcagcaattcatctttttaatcaagctgctaaagtacaatggatctctgcagtgatttaggatgtccagttctaggaagcattgttctgggctttcagaatgtaggaggagatctttgtactatttcagtctttttgataaacaagtcataaagaagaaaccagttgtctgagattgccataaactgtaaactctttgacagtaacataaagagatggattaaattggaatacaaccaaatttatctggaggttctgaacaaaggctggtcactgaagtaatcatagaattgacagccaagcactcctttccatcagttaagtaaagaacgaaataaactgtttacatgattttatcccccattctgaatggaagacaaaagcttcaggaacccttgatggcagataaaatgtcctgtggagtcttcttggtaatcattagagcacgttgttttatcatctgagacagtaagaacccaaacaatttaacaatgtcttcaaaggctttgctagattagacagtacgaaaaataaacatcaagaatgtggaaactatcatgtacaagaaagaccatgcaatgttgactcttttttttattttttcctctctctcttttgagacagagtcttgctctgagtccagtggcgcagtctctgctcactgcaacctctgcctcccgggttgaagcaattctcctgcctaaacctcctgagtagctggggttccagggacccgccactatgcctggctactttttgtatttttagtagagacagggtttcaccatgttggccaagctgctctcaaattcctgacctcgtgatctgcccgcctcgggcttccaaagtgctgggattacaggcatgagccactgtaccgggcccccaatgttgattgttatgtgattggtctactcacacacgtatggtgaagaggtgagatccacatatgtaggcttgcagttattggggaaatcttagataactgcatcatattattgttcttggtttttatttctatttagtttcctaatgccttgaacttgtgagtaaagggactgattgatgaagtttaaaagcataagttcaggacagattcacacacttttcattatctggaaaaacaacttgggtagaagaagtggaacattacctgtgagtcacagaatgtgtatttttttgctgtgaattttctactttaaagtataggtatttaatatgcactggtaatacttttttcacatctgctgaagttctagggtaagtaataaaatattgaggggattttcaagatggctgactaggaacatcagatgccagttctgctcaggacaaagatcaaagtgatgaatggacattttcctaatggaaaactaagggaaaagagccaagaattgtcagagtgcccatgggaactaggtggggtgaaaaaaacaaaagcagagagagtctggtagagattgactcctgaggtaatcacaaccccacagaaagggtaagtgggagagcttctctgtttcgttcacccctgcaacaacctgctgactgccaatctgctggggaggccctccaccctcaggacctaaggaaacactgtcagtggcagtataggaacttgctggggtcagagaaccaggtggctggcttgcagctgagcctgaactctcctcaaacatgaactgaggtggcaggcgccatactgtttgtgcacgcatggtgggccactgccctccccagggaacctccacccttgagtccctgcacctttaattctcccacaaacatacccacatgactctctctgactttggcaagcacaggccaaagtcagagagagtgcctgcggagctgcaggacccctggacatctacgtctaggtttgggctgcccctaaaggagagaaaagtacagctccataaagctcatcttgggacaaaggaaacacggacgtggcaccaattgctgaacagggaggtactgacggccacgaacagatgtggagggagggtcatcattgtgccttgccccattcattgctgaagatgaagcagtggttctccccctgagggtcgtcatgtttgtacctggagaaggtgctcttcacactttttgcggtggctccactccccctgaaaatgaggatgtgcagcttggacttacaaaaagagtggggcccaacttcccctcccaacacagtgtggcagcatcccagcaacagaggacagacaagccatagagttgtctgctctggactgagagaagagtctctgtgctgagcccattttggtggtagccaccagaggggcatattcatggtccacagccacactgtggccaggaaccaaagcacaaaaaccgtatgaactgaaagtcgtaagtcctgcagtagcagcatgatagggaagaggatttctatctttcctactcaggatgaggagctggtgcatcccccagccccttctcttgagacctcagtacacctcaacacaatttccctctaaaccccacccctagtcagggtggatggctccacacttaaacagcctaccagaggatgagctggttcctactcttaaatgccacctactgaactggagcccaaaattcaccaccaaataaaaaacctgctgctagaatggcttagtgctagttcatgtgataggattactgagacctctgcaccctcagcccagcaggacatagtttgttggattaaatgtacaatggattgctacaagaagaaccatctgagaaagccacagcacagaagctgtccacaaccaaaacactcattacagagccttgggcccctgaaagcacccagcaatgaatccaaacaaccatacacaacataaatcacagtcataccctcaaggaacaaaataattttttaaaagttacatccaaataaaaataagaagcaacacacacacacacacacacacacacacacacacacacacacacacaaaggattcaggatgtgaaagacaagatagctatattaaaaaaatagaacatctggaattgaaatttcactaaagaaatttcaaaataaaagtggaattatgagcaatagaatagatcaagcagaagaaacaattttagagattgaagagcaattttacaaattaacccagtcagacaaaaataaagaaaaatagaattaaaaagaacaaatccttcaagagatgtggaattatgtaaaacaaccaaacccacgacttattggcattcctgagatagaagaaaaagcgagcaacatggaaaacataattgagggaataataattccaaaaaaaattcctaatcttcctagagagatagatatccagatacaagaaattcagacaaccacctgcaagttacagtacaagatgaccataaccaaggtaaatagtcatcaaactatctaaagtcaacacaaaagaaaaaaaaatcttaaggcagctaaggaaaagttacaaattacctatgaaggaaatctcatcagagtaacagcggacttttcagcagaaatttcaccaggccagaagagactgggggcttctttttagccttcttgaagaaaaaaaaaaatgccagccaagaattttatttcttgccaaactaacctttataaataaagaaaaataaagtctttcccagacaagccaagagtaaggaaatttgtcaccaccagaccaccactacaagaaatgctcaaaggagtcctaaacattgaaataaaggtcagtacttcctttaataaaagcatatgtaagtacagagttcacagatcctgtaaatccattacatgactgagactacaaagcaactagctaacagcactatcacaggaacaaaacctcacataccaatattaaccttgagctgaaatagtctgatttttccacttaaaagacatagattggcaaattggattaaaaaaaatactcaaccaccatcttttgccttcaagagacctgtctcatgtgtattgatgcccacagtcccaaaagattgaagtaaagttatgtcacacaaatgtaaaacaaaaaaaagaacaagggatactctttttgtatcatatgtaacagattttaaaccaacaacagtagaaaaaaaaagaatggaattatttagtgataaaggtttcaattcaacaagaagatttaactgtcctagatatgtacacacaacatcagcacagccagatttaaaaaataacaattactactacacctaagagacagaaagcaatacaataatagtggaggacatcaggaccccacttacatctctagatcatcaaggcagaaaactaacaagaaaatctggacgtaaattggactgttgacaaaatgtacctaatagatatctacaaaacatctacccaacagctggaaaatgcttttttttcccctcatctgtgcatggggcactctctaaaattgaccacatgcttggtaatcaagccagtctcaataaattcaaaaggataaaaattatgccaaatattttgtcggacaacagtggaataaaatttgaatgcaataccaagtggaactctcaaaaccacacaattacatggaagttaaacaacctgttcctgattgacctacttctgaatgacttttaggtaattaacaaagttaagaaaataatcaaaaaatttttgaaacaaatgaaaatagagacacaacataccaaaattgttgggatacagcaaaagttgtgttaagatgaaagcagtagtgctaaatgcctacatcaaaatgatagaaagatctcaaatttacaacctaacattgcaccttaagaaactagaaaaacaagaaaaaatcaaacccaaagctagcagaaacatgaaacagcaaaggtcacggaagaaatgcatgaaactgagaccaaaaaatcatacaaagaattaatgaaataaaaagttaattatttgaaaggttaaacaaaggtgatagatggctagctagattaactaagaaaaaagagcagattcaagtaagaacaatcagaaatgaaataggtgacattgcaactgataccacacaaataaaagaaatactcaaagaccactatgaacatctctatgcatacaaactaggaaccttagaggaaatgtataaattcctggaaacacacaaccttccaagaatgaaccaggaagaagtagaaactctgaacagaacaataacaagttacaaacttgaatcagtaataaataatccaccaaccacaggaagcccacgaccagacagattcacagccacattctaccagatgtacaaagcagagctagtactaatcttattgaatatgtttctaaaaatcagggagaaggggtttcttcctaactcattctattaaaccagtattaccctgataccaaaatctgacaagaacacacacacaccaaagagaaaactacaggctaatatccctgatgaatatagatgcaaaaatattcaacaaaatacttgcaagaaaaatcaaagaatacatctcaaaataataagagctatatttgactaaccaatggccgacatcatactgaatgagcaaaagttgaaagaatttcccttaagaactggttcagaaacagaatatcctctctcaccactcctattcaataaaatagtggaagacctagccagaacaatcagtcaaaaaaaaaaaaaaaaaaaagatgtcttgcaaataggaaaagtggaagtcagatgtattagtccattttcacactggtggtaaatacatacctcaaactgggcaattaacaaaataaagatatttaatggactcacagttccacgtggctggggaggcctcacaatcatggcagaaggtgaaagtcaagtctcagatggcagcagagagagaagagagcttgtgcagagaaactcccctttttaaaatcatcagctctcatgaaacttattcactgtcatgagaacagcatgggaaagacctgcccccatgattcaattacctcccaccgggtcactcccacaacaacatgtgggaattcaatatgagatttgggtggggacacagccaaaccatattatcaaattatccctcttctctgacaacatgatcctatacctagaaaacactgatgattcctccagtggacttccagacctgatcaatgacttcagtaaagtttcatgatacaaaattaatgtgcaaaaatcagttgcatttctatatgccaacaatgctgaagcagagaatcaaatcaagagctccattttatttacaactgccacaaaaaataaaataaaataaaatacctaggaatacatttaaccaaggaaatgaaagatctctacaaggtgaactagaaaacgctgatcaaagaaattgtagataatacaaagaaatagaaaaacatcccatgctaatggataggaaaaatcaatattgttaaaataacaatactttccaaagtaatctacaaattcaatgaaattcatataaaattaccacccaattgttcaaaaaattttttaaaaatctaaaattcataatggaccacacaagagccaaatacccaaagcaatcctaagcaaaaacaacagagccaaaggcaccacattgcctgacttcaaactataccacaagaatatataacaaaaacagcatattactggttcaaaaatagatacatagatcaatgaaacagaatagacaatgcaaaaatatagccacacacctacaaccaactgatctttctcaaagttgacaaaaataaacaatggggaaaggatggctattcaataaatgatgctgagtaaacaggctaaacgtatgcagaagaattaaactggacccctaatttgaaccacgcacaaaaagtagctcaagatgaattaaggacttaaatataaagtccaaaaacataaaaatcctaaaagaaatgtcctttgggacattagcctaggcaaagaatttatgatgaagatcataaagcaaatgcaacaaaaccaaaaatagacaaatgggatttaagtaagctaaagatctgcacagcaaaagaaaccatcaacaaaacccacagaaaacttacaaaattgggagaaaatatttgcaaactatgcctctgacaaaggattgatacccagaatctatagggaacttaaacaaatcaacaagaaatgaacaaataaccctgttaaaaactgggcacaggaaatgaacagatacctcttaaaagaagacatacaagtggccaacaaagatatgaataaatgctaaacatcagtaatcatcagagaaatgcaaattaaaaccataatgcaataacatttgacaccagccagaatggctattattaaaaagtcaaaaactaacagatgttggtgaggctgagatgaaaaggaaacacttatacatcatcaatgggaatgtaaattagttcaaccccaatagaaaacagtctggagatttctcaaagagctaaaaatagaactaccatttgacctagcaattccattattcagtacctaagcaaaggaaaacaaatcacttttcaaaatgacacctggacttgtatgtttataatagcactattcacaatagaaaagttatagaatcaacctaagtgtcaatcaatgttggattatataaatgaaatgtgatgtgtatgtatgtgtgtgtgcatatatatatatacacacacacacatatatacacacacatacatacacacacatacatcattttgttaagatctttggcataagtgtgtatatatatacatatatatatattccactatatatatacatatatatatattccactatatatatacacacacgtatatatattccactttatatacacacatgcacacgcacacacgtgtgtgtgtgttcatagtgggatatatatatgtgtgtgtatatatatacacatatattagatatacacatatatatgtgtgtgtatatatatgtgtatgtgtatatatacacatatatattatatatgtgtatgtgtatatatacacatatatattatatatgtgtctgtgtatatatgtacacatatatactatatatgtgtatgtgtatatatatacacacatatattatatatacatatataatatatatacatacatatattatatatacatatataatatatatacatatatacttatatatattatatatgtatatataatatatgtgtgtatgtatgtgtgtatatagtatattatattatatatatgcatgtgtatgtgtatatatacgtatatacacacatatatgtacacatatgtgtgtatatatacgtgtatacatacacgtatatatacacatatataatatatatgtgtatgtatgtatatattatattatatatacacatacacatatatgtacacaccatatattatatatgtgtatatataatatatgtgtgtatatatattatatatacacacatatataatatatgtgtgtatatatattatatatacacatatataatatatgtgtgtatatatacacatacacacatatgtgtgtatgtatatatgtatgtatatatgtataagtggaatactacacagacattaaaaaaaatgcagtcatgtccttcacagtaacatggagctagaggccattatcctatgtgaaataactcagaaacagaaaaacaaatgccacatattctcacttataagtgggagctaagcaacggatacacatggatatataggtggacattggggacttcaaaatggggaaaaaggagagggggaaatgtgttgaataatgacctactgagtactactcactgtgttcaccatttgggtgatgggctcaaacccaaacctcagcattactcaactactcatgtaacaaacctgcacatgtacccctgaatctataataaaaaattatagtataaaagattgttttattattcatacaaccagctctgttttcagatgtaatgattgaatgaaaaatattaatgaataagtgagggtgttattttgattttgaagcctatctagaactcagtgatacggtaatagtcacctttctttagaatcaatcaattagaatatattcaaatgtttttgcttccttctacctgatattttaaaaaaatggtttgattttaaaaaccctttcaaaaatatgagtaaaataattaactccttttctggggatgacagtggggagtagagttgcatctttttatttgggaaatttagacttaaacatactgtttttttactcattcaactaattcaactactgtattcctaaattatttaagtaacattatagatgtctgcaatgttccagcctctgagaatgaccatgaggtttcataaattcaataagacattctcttttctcagcaaaaattgcattctaattagagatatggccatataaacaaataattatgcggtactattcacaatagcaaagacttggaaccaacccaaatgtccataaatggtagacgtattaagaaaatgtggcacatatacactatggaatactatgcagccataaaaaaggatgagtgcgtgtcctttgtagggacatggatgaagctggaaaccatcattctcagcaaactatcacagggacaaaaaaacaaacaccgtgtgttctcactcataggtgggaattgaacaatgagaactcatggacacagcaaggggaacatcacacaccggggcctgttgtggggtgggtggaggggggagggatagcattaggagatatacctaatgtaaatgacgagttaatgggtgcagcacaccaacatggcacatgtatacatatgcaacaaacctgcacgttgtgcacatgtaccctagaacttaaagtataataaaaaataataataattatgcccaaaatgagctgtgggagcacacagagagacatatgcaggtttgttgcacaggtaaacttgtgtcataggagttcattgtacagattatttcatcacgcagctattaagcctaggtaccaattagttatttttcctaatcctctcccttctcccaccaaggagatatctgatgtgtaaataacaactcaccaggggaagcagttgggaaaagagtcatacttccatgtgaccaaatttgaagcatactgcacagtttaatatttaattatgtttattatcatactagttagacataaataaagcacttttgatactattacaatttttcttagcattgattgagaaacttggtgactccaagcatacttgttacattataataagctttgtttagtacacaatgttcttcaaatatttactaaggcaatagactgttttcattttgctttataagaataaaactttaaattttgcactgcatttcctattcctcaccagggtaatagagtatttgaatatttgagtattatttgcttataacttctacagcttgttgtacaaccttacctgggctggaaatcttaagcatgtcagtcaacatcatcaaatgtaggaaaactaattttgtttaaataaattccatttaaatttggattgtgtaaagatttttcacagttcatttggaagaaaaaaaattgtagatacaattttgattggcaatctccactcagaggtgtacaaatatggagcaattttcttgtgtgaaacaaacaaaaattacatacatttgtctttgcgagctcctctagagttaagaggaagagttactattacagcatttaacatttactgattatttacaatgtgtcaaacactgatttaaattctttatactatttcttgtaaatataatggagctagtattgaattcacagttttatgtaagaaagtcctaaagacagaaagtttgtttcttgcagtttatacagttaattggatatctcatagatagactcttggtttaatataccttcctgagatatcacctgtatatctcatgagaagggaaaatgtgcttatatacggctgtggctactggtggacccttagatacatgctcatattctgctcattggttcggctgcagcatttttggctcttgtgaatttctgactctttgaactgcttatttagagaaattcctggtgaatatgtggtttgcacgcatgactcggtctaagtcaaggggctccctcatgttgccatggcaccatctcagtttttgttggtgctgaggatttttcggagttcagctccatgttccatcccactcgtggctgctgtgcacctcaaggtcagtcacttatctctcacggaggaatttctcacagcaagtctaatgactgaagctacattgtgctgcatgtttgggttttgggacattgcaccttcccacaccacacaggagccaagaattacccaacaacatgacactgcttctcttttggacttactgtgccacagtgaattgttttctttgcttccttgcagtgtttaacgttgatgcaggatcactgtcttgggagttgcctcacgctgttttctctctctcaaacacatgcattcacattcacacacacacatatagccccagaaaattgtgagctccaatttcgttatatcagcctttctttcaatatgtggaaaacctctcactgttattttatctcaagctgggaagccattgtacatgagaatatatctgatatccccataattcttatctctcttctgattcactttgcttcatcggagaagggatggactgtttgttgcctcctccaacctggaaggaatcccccaagcttagctttttcttcattctgagaaggtaccgaatttgccccttcacttaaattctttagcagcatcaacaaaatagcaccaagtattttggagatcgaaagttgattcaggctaggagttacagtctaagcacaggtgcacttaaatctaactaatctaactatggatccttcagaaacaaataaacctgaaccctgtccccacatgtaacctgagattattagactagagatcctggagacaccttcaggctagaatcatccaagattctgagatgcctgaaatacttgcattgaaaaaacttaaacaaaaggttgtttctgtatttagccactccaatttatttgccatttaaaaatttatctgtcatcctttccctatctttatgaatactttggagtgcattctttgtaaactgtgttttctttgtataatacttaatcttggtactaaacataaatgtccctggctataatataaagagctcctgcaactgattggaggcctgagaaacagaattgctgtttactacttaaaacatttaaatggttgattttatggaaagtgggagtttttcagcctggtgaaatatttttcctatggctacatcgcagcacacttcatagcagttcaaacacatctcctcagtgagtccatgcatggcttttgaatgaaccaattaagtaatgagtaaattgttagatatttctttgattatagatgtcgattttatttgggtaatcactgttaccatgtgctactgaaaacctacacatgccttgtaatattctttctaaattgtttattttaaagaagggtatgcctttagaaatattttggaatgtgtaatataaagttcatgttacagtaattttatgattggcacttaacaaaagaaattagtatattctcacattaatggtaacatctttcataagtctctcattttagtgcttctaattaaaatcattatttttctaatgtggaagagggtgttttcctttttctctacaatattttgtagtagcatttgcagtactctgataagtttcacattttctgacaatgtacatcaaagtttactgttaagcaatgtaagtgttgaatatctagtagtatcatataattcatgaaagaaaggaaggcaaaaccttctgactgaacctttatgtgacagatatgtttgatttctgatttgtcaggtttctacacaaggtttatgctaaccttagtctggagagagaatacccacattggggaagacaaagcacttacataagcatctggagacttaggtattaggcacagtgcaaacactcctgtaatttaatttagtactgcgtaatattagtggtgataaaaaaatcttacactatgttctatgttgacttcatcaaggcagctaataacttacatgtctaagtgttgcctgttgaaataaacttggattggatgtataatttgggattagctgcctcttcaagatattttagttttaattaaatatcactctcaaagtaagtgatgagtgacctgttcctggtctcataatgtactcagggcctaactaccacataagcacagattggttgactcatgactcagacaacgttccccagcctaattggcactaagatatatttcctacttttatttacattaaatgatataagacaaaaaggatttactttaaaacaaaaatatgagacaggtggtcctattgcttactggtttttgaatcttaacgtaatgattttacttttactaataaactaattgctaggtatttctatgcaataatgtttacttatgtttggagttgtgacttctatatttacttcttaaatgtattgcagctatttaattcatacaatgcgttttaggaaaataatcatttccctccattttcaaaacaaaagcatattcaaagtagcgtaagcctcctttcataaatattttctttttagtatgatgtatttcactttaattttttggtgagcccaggtttctacatgcttgacctttgggagattttcaaaacctatttgatttttttttcagttctgtggcttgatgtctgatgggcctgtaatgattatataatacattgcctgaccatcatggccttccctagttcatcatctctgcactttttaaaacagatattctcatcttctcttttagttattttttttttatttgaaccttatttttccattttattcaattggcctcttttggacatcaattagtttttcagtactgattatttagatgacatttttgtacattttatgttcacatgtgatatgtgtatgtttgaaatgaaaaacacccacatactactgaataaaacaagtctactgagaatgaaataaatttaaaattgctttttattggattcaacttttaaactcaataaaaatctaaaaagaatgtatttaatttttgttttatttttgctaaagtacatattcatgtatgcacaaatattttagcatgtattttcttccagacctgtgctgggtttatagactaagattaataaggcaagacattgtcactattttccaagagcgtatcatccagtggagagacaaatgtgccaataaaatttcatatgtgttaagtgctcctagcaaatagtacagaaactaaaaacaaacagcctttttcagttttagattaattttaacttaaatagcactaaattattttgtgtagggtaatatcatgcctttaaactttctttgtgctttctgcatattaaaattatgtaatgcttatcaagctatttctgtgcagtgtgttatatgctctaagaaaaagtattacagaattttagaagacaatgaaaggctatttggagtactatttataagacaatgtggctatttggagtactcatgtatgactgataggaatattcatagttgagaaaaaggaaagagttctaataaataaggaacaaaatgtgaaaagaaatagagtaataaaaaagtggggcctttagcaaaatttcctgatagtttactattttttgtttgtgttattttgatttggttagaaataagttctagtcaatgagaacacttggacacaggaaggggaacatcacacaccggggcctgtcatggggtgaggggagtggggagggatagcattaggagatatacctcatgtaaatgatgagttaatgggtgcagcacaccaacatggtgcatgtatacatatgtaacaaacctgcatgttgtgcacatgtaccctagaacttaaagtataatttaaaaaacaaagaaataagttctagtaaggtcaggtgatgtccagattgttaaaaagcttaaatgataaagtgtgaaggagtttggattttatttatacacagtgggaagtatatttgttctagagattgtagacatattagactgccatagtccaaatcaatgctgatcacattttaatgtgtgctgcaatcaacttaaattatacattgtgattactctgaaatggcacctgagatctgtactacaaagaagctcctaattgaggtcactagtgttggactggtaaccactttctgagtagcaatggttagcatctggaagttacttaaatatgagactccttggccctacaccaaatatactgaatcagaatttccagtgatgagaccaaaactaaatttaaaaactacacacatataccagaaaaaaacacgcacacatacacacacatgcgcgcgcgcgcacacacacacacacacacacacacttcctcagatgtttctgataaattcaatacctgacctgactcaattttgcagaatattcactagagcagcctagcaatggggagactaaaactaagcaagaatgaagagagacatatttaagggacatttaaaaaaagaatgagttggatattttgagtatttatatttgagaaaaggagatataatcttatacatttctcagttatctggcaaataggctcagtggataacaattacattactgaagatgaggattaaggaataaggtaagacagaaagagaatgctcttgaattttgatatgccaaatttgagacatgtaaatttttcaaagtaatatggtatttaatgtattagcaaatatgtttccagactccaaaatgataatagggacatgcattcacacacacacacacacacacacacacacgggacatgcattcacacacatacacacacacacacacacacacacaatctgtaattaaaatatagaaaagggaataaagggataaggagatggtgggcatatagaagctgagtctcaagtgcttgagaaggaccaaacaaatggctggattcaaatctggtttcaccgtatattggctgagtggccagtagcaatgacacaatcctttgcctcagccttctcatctctaaaacaagattgaaatatctaccttatagtagtatctactttatagaaatgtttgaggaataaagtagttattgtgggtatgcatagtaaatatcatatatgtttgtagtacaggaagatagatagaacaccaagagaagaaaacaaagaagatattgctaagaaacaaatatttaagggatacatggtagaagagataccatatactactatatactatactatatactatccttactaatataagaatagtcaggaaagtgagcaaactataaatatggaggtgtcaggaaacaggagggtcaaagaacaaagtagttggcagtatctcattcttaagtaaaataaaaatgaaaactgaaaactattattgggttggaaaatgagaagattatggtttattttaagaacactaaacttattagtagaatggagaggacagaataaaaaacaaagaaagaatggatactagaaagttcattttttaaaacaatgtaatgacaagtaggatatactgtattaatttgagagggttagggagataattttttaatattatttggttattttgttttattttctcttttggttttaaatttattattatttcttgtttaggatgaaactttattaaagagtgtgcatagcttgacaggaaaagtgctatagaaaaagaatcactaagaagtttaggccgggtgcgttggctcatgcctgtaatcccagcactttgggaggctgaggcaggcagatcacctgaggtcgggagtttgagaccagcatgaagaacatggagaaaccctgtctctactaaaaatacaaaattagccgggcgtggtggcgcatggctgtaatcccagctacttgggaggcttgaggcaggagaatcacttgaagcccggaagctgaggtgtggtgagctgagatcgcaccattgcactccagcctgggcgacaagagctaaactctgtctgaaaaaaaaaaaaaaaaattttaatcacttagccctagaaggattcagatgacctaatagcagggacatctattttcctaatttaggatgagaagatcaaagaggtttgagtacagatataaagatgtatgcaggtaaagaggaactacactaaaatctttaactttattttcttgttacaattagaagaaacaataaaaataatttttaaaaaatattcatgaattcctaaaatgtttgacgttagagaatttctctcctaagtgatccaaaatttctgaaattgtttgaatattgtagcatttttcagaatcaaataacacacataggctgttgtaatgcactgttataaaaatccaataacaaggagagaataattaaataacgtaaataattattttgcagcagataacattttaaaatatgtttcaatgagaaaattgtattcatttgctataatcaataatttataagaacattttaaggagtaatactctgagattttctataattactaaataaatatcttagtcttttaacactgttaatgtggaagcctagaaaaataaaaaaagtgcttgttgaaaaatgttgcagctcgttgtcccaagatcaatcagtgtcttaagttatctccacatgtcttatgaaattctaagtgaaccaaagcaggctctgtgtcagacagttagaaggctggttcagttgtcagtttttaaatctctgtaggtgataaactcattttaaatgccactgctaaatgttgtatcaaatagcaaagggcgcttggtaccctgatggaacttagaaatgctaatatattcattatatttatattactataaattttaaaaatatcttttgaatatctgtttgctctgggtgcttacttataaatattaatttaatctctgttatgataatgattatcttcgatataatgttacctatgttttattttgagaaataatctttatttaaaaagataaatttggaccgggcgcggtggctcacgcctgtaatcccagcactttgggaggccgaggcgggtggatcaccaggtcaggagattgagaccatcctggctaacacggtgaaaccccatctctactaaaaatacaaaaaattagccgggcgtggtggcgggtgcctgtagtcccagctactctggaggctgaggcaggagaatggcgtgaacctgggaggcggagcttgcagtgagctgagatcatgccactgcactccagcctgggcgacagagcgagactctgtcataaaaaaataaaaaataaaaataaataaaaaaagaaaaataaaaaataaaaataaataaatttatggccttatattttcccctccattaactgattatgagaaatatccaaaattctgtctccctacctttctcgtaggtaaacactcatagtaaaattctttgtcatatcaataacccttgtgtcaacagaggtagaaaatcttaacatctttgacttttctcctttatcactaatgctttaactgatcacagatgtaacgtaccttgaatcttttcttacatctattctctaccttttcatattctttgccacaggtaaacttatatatttatcacaagataccctcttgtttttatctcccttcattcaatttgtcagtaattttacctcacaactagtgtttaccaaatgccaattttatcatgtatgtttttatttataagtaattttggacaaaaattcaagtcagttgtttctgatattctcctgagtgttttccaaactatttttccaatatttcagcaatattctagatgagatggaccttgtctatactgacctactaatttcctaaatgttccttgaacacttcagccttacccaatgtggaatgcccttattcttttctatccttttataacaatatctatggcattttttatctttttatgtttcattgtcgtctataaagtcttcttgatcataaattttataatgggcaaacttgatacaccccatcttattttatttttcataattttatgtaccccatagtcctcccaaatacatcttaaaccccttgatattagaaagtatttcttgctatttttgagtatgatcatatttagaagagggatttgcaaaatacatatagttaataaatacttatgagtatagtacataatttttaatttacccaactctacttataagattgttatttcatgcacttctttgggaattattcacagagaacatatattcatcatgcatttacttttgagtccttgggtttaaaacttttccttaccttaagtaagaaatttgtgatgatatttatggatagctatcaaatgtttcattcttgtccaattttctccaaacataaatttttgacattaggaaacaatttagttttcttctggctgccataggtgataaactcatcacttaccttatattgatttgggtcaaaaatcagccactagggcaagattaaggcacaacctcaaattttagttatgtaggatttactaatatgccaatgttttaatatatatgtatagttcaattagagcaaatctggtctttgggaaatatagtgaagtagagaattatattttctttatatattttaaacatatatagcaatgaaatatatcattgtgcccattcaccaaaatgtccatgaataatatggcttaattaatatgtgcattggtaatttgtactgaatgaaaaattaaccagatgtttaatataaataaattaattaatttcatgttcaattttattttattaaaatgaattaagatcaacaaatcagtataaacagttttcagaactgtatttgacttttaaaatttctatagctttcaagttcttttttataaacccttccttagaaaagcaaatttactcctaaggtcagtggtaggcattaagtaataattcacacacatttcttagattcctgatatccttaaatgaagtcattccaaaattatatgttgtcaatacagtcggtgttctataactagcacatgataagctcttcgtaagtgtcaattattctgccattcattcatatattattagtttgggagaaataaagtttgatgaatgagccctcacttccagaaatttatatttaaataaggtagagaaccaaatagaatgatcaacaaaataagttttatttgtttaatggaaattcctactgatcaaagatattgatgtatttattgataccatagatgggtctatcacacactgttttgtaaagttcatgatattttatgttttctttgaagatagaaagtaggaagccatgaggggttgtatagaaaaaggagattagaacagacaaaacagtttgggcaaatgcacaatggtaggcaagtgtgagtcagttggggagaggagagagaatgaatcctaggtgatcatagctgcagaagcattggaaatgagtaatagcaaataaacttggaaaggcaagtttccttccaattataatttgtatggtaagggacaaattaaatcaattttgaagatctttgagcagaagagtgaaattaaacatagttttagaaatatatgcatgcagtagtctgacaaatacattagagggaaaagagattaaagaggcaaaagtgagaaaaaatatggcagatgaaatatattggattaaaattaatgagtgcgtgtatttaaaaataaaaaaatgcatacaaatagtttatattggcaatgtttgaaaattgattgatggtgactaaaaatgggacagtgaaccgtgagcaaattttgatgttagaggaatatgtttggtttgcatacagaaaatttgaaattgaagtatgctaatgttaactgcaggttgaagatggcaagattagattttgagaaagtacagttttaggggaaataagattatatcttaaagaagaaagtaaagggaagaaagaaaagagaagacacataattataatttcccctccctttttttttcaaacttgtaatatattttctgcttctttcccttctatccataaacattctcaagtcttctcaatttataaaatccatgccctactgcccagaattgtggattccagtaaccccatacatctcttcagattcaagcttcttataagggcaatctcaaatttcttgagttctgcattttgcctctgttgacctcattccacttaagctaacttcaaaaagaaaattgtttacttatttaaaggaaaaagacatctgaattttcactggatttggcattaatggtttatctacaagaaaagtaggcaagggagaaaaagagagtacctaaaatctatttttcccttggctacttttcttattctttctgacttgcacttttatttttctttctgaaacgttagatatatttgaacatttattgagcctctataatatcacaaccattctctgagtattggtaaattatgaataaaaataggacccaggaaagtcatgtagaccctgcccaagttttccagagaggtttctggaaaggaggaaggaatttaacaatttaaggtggagactgtgaggaaacatattttaaagagcttaaacagcataattaccagggttttatttatttattttttttggtaaatattttgttgcttcctcctgttctttattacacattttatttctttaaatactttcaatgtagttgtgttatattcttagtctaaaaattatgttagttgaaatctcatgggtttatttctcctatttgctgtttcagctgactcctgcttacaggccttatttcaccatgtgttttataatgtcagactacacccccagattgaagacagcctcatttatacaactattggccagtatgagcctatgatatggttcttctgaatggtttttgtgattgcttttgccacttagctgtgagccctacacgtgagactgctttttagtttttccaggttgaagttttccaaagaacacgtttataattaaaatcccaaacatgggatatggcaaaacttctggtttatctaatgagaaacattttcccccttcccagcttgggggaggcaagtttccttgtaatctcccttcaccattgggttgactgattttataccctcctttgatggtaaatcttattccagtccagtgttatctggtgttcttttttgtttttgttttctgagacagagtttcactcttgttgccaggctggattgcagtcgtgcgatctcggctcactgcaacctccgccttccagtttcaagcaattctcctgcctcaggctcccgagtagctgggattacaggcttctgccaccacacccagctaatttttgcatttttagtagagacggggtttcaccatgtttgccaggctggtctcaaactcctgaccttgtgatctgccggccttggcctcccaaagtgctgggattacaggcgtggtcgttatctggtgttctatcacagcctgttgttctgggaaaacttggatcctatctgtgtgtagtctgtgttcactgaaataagcattttggttactatgatcaataaattcccagtgcaggttcgtactctagtttcagatcttccttgattgacctcttgcagctttgtcactttaccaaaagctcaagtacgtgcatttgagcacgtggaaggtgagacggagtttggaaagtggtcatgctctcttttctaccatattgttagaaatatgtcaattcatattaaaataacactttgcttatcttctaaacttctagatattcaagtattttatttcaaatttcacaaaaaaattatttaaaatatcaggcatctcctctcttttattgtcctgggtccttcacttaactttctgatcttgtgaaaatcagtgctgcttcatcttactctgtgcagtgctttctttcctttgtatgcctgccttcacagacaatttttagtaggtgtctacatgtagttaatttgcgtgtgtgtgtgtgtgtgtgtagttgttgtaatgataatataggatttatacaactgttgggcaaacatcttttttttagctattgcccaatgtggtcacacatataagacctaatctctgaataaggaacagattgtctgagtgtgaatttgttcatttacttgactaacagaatttcagactatcagcttgaagaagtgctgtatttagtctgatggttaaatgcataacaaagtaatatgtataatggtagatcatgttttacaaaactttcatttttctttataggtaataaaaaattggggggaaataatcagcgtttggaccatgtggtttagacatcatgcattaaaatcttagaaatcacgcttaaaaatcaccattaattgtttcccaattttttttcagctcttcttcaagtgacaatttcacttagcaaagtagagcttagtgttggagaatctaaattcttcacatgtacaggtacgtatttctgtaaataccttcagataacgtggtttctgttaaaatattaataaaatgtgttggctaaatttaactagttaaaaactcagttctctaacaataacatcttacagttggttttttgtttttgtttttgttgtttttgagacagagcctcgctctgtctcccagactggagggcggtagtgtgatctcggctcactgcaatctccccctcctgggttcaagccgttctcctgcctcagcctcttcagtagctggactacaggtgctcaccaccatgcctggctaatttttgtctttttgtgtttttgtagtagagacggggtttcaccatgttggccaggctggtctcaaacttctgacctcaagtgatccgcccgccttggcctcctgaagtgctgggattacaggtgtgagccatcatacctggccattgttgggcttataatgattggaaaagtgttaatagccataacttgcatataaaatgatattaattttatttttgttaatttgttaatttagactgctaatctagatcatttattttgaaaataccttatgcttgcattatatctgataataacttaaatcaatttaaatatttctgtctaaacagtaatattaggatgaatataaagattataactgaaccatttttgtaaatatgcaatgaataaatttggtatggcacactgcactatagttatacttgaatgaaaatattaggccaaaaatttattctaatattcattgaagaaatagttatttagtcaggaaagctttgactagatttttatgacaatggaaagaatcatatgtcatcatgcctatggcatattttatgggcctcattcagaataataatatacatatggttttctttccaaagaaatttaaatatttcagcatcaaagtttaatcaaacatattatagaactgacaaatgaatgcattatttatttaggtacaatatattcatttttacaaatacaagtcttcatatccaaactatgatatacctaaataattttttaaaccttagtgctaaaattagttgagactattttagaattgtttctaatcttgattacactaaatcaacttaaaactggattaaaatagacactagaaacataaaatgcattataaaaattgtcttgagaatgacatgatttatttaaaccaagattcaaatttataaatatagagatataatattttataaataaaagatatagttataacattttataaatcatattcagagcatatatgtataacatgtcacattttataggaatattaatagagcccatgattctttatacattttccttcttaaagatgtcagttgatagttatgttaatacaagtatttgtatattgacaaatgaaaaaatcagagagtgtggaagagattgattcagcatcatatattatgtcagcagaaatttgacacaagcatataggttactgtttctaaatcccatccatattttattaatatcctcataaattagaacacacgaattgtatcacataaaggtagaataacaaaatagttaaaaaatcaattttgaaaatacaatgaaattgttgtacttttatggatttgtatattactatgaaatatattgcacagactaatttgcctgtatgtattgcatagctcaaattaagacatactttaaagtgaattaaggccattcattggtgatgagttttgctcttaataagaatgtaaactaagtaagcatttattttcttttatataaagatgtatcacctagagcttttctatagtactggaagtagtcttatttatattaaatatagtagtaaaacaagattctaaaaataaagatattggaaaaccatgcaagccactctgcttgtatgtatttttctactacaatgctgacaatctagatactcctccaacatttccagacgccttaaaaatacaaaatctaaaactcaataaaataaatatcttaaatttaaactagaaggatgttacaccctcaaagagctaaagaagtgtcatacagaaaattgttataactacatttaagaaaataaagtttaatgctatttataaataatctgtacgtacaaatagtccagccttatcaaaatggaaaattttgatagaaattatttgttagagatgcctgaaagaaaacaattataacagctttatgaaaatctgcaataaactgttaatgaaaatgaaatgttctattatattaagaatgaaaagactcaaaatatttatcagaatatcctatttaacttactatataaaatattattttgtattattcaaatgtaaagagatgaatgtttaaattattttttgtgacttctccatagatggaggaattaaataaaacacatccctcctcttcaaatgcattactctgtaacaactatggttttatgatttgtttagaaaaagatgaagataatgtaactgagatctttttaagattcactaaactttctttcatacttttactcaagcatgtctaatttcttatagaaaggaggataatttgtttctaaaaccatttcttcggaaaaatgagaaggaataattttcttcaaagaggtcctgcagatgttagttgacttcatgcatttccacatcgatacttttgagttaatagtgtctgctgcttccataaatgatatctgaagtaattaggtgaaatacatccttttggtgactaaaagcagacacagaaatcttcagctttaatgaaaggatagtaacctagattctgaattggaaaacttaaataaatgtttaccctgtaatgatttggttgtaattacctagataagtatcatttcaatgcattgaaattatcatatgaataaatagttaacagttttagattaaaataatgaaactacttatttctcttgggaaaagagattaggacatcattataaaaacggtcgttggccttatctattcaaatttagcaactagggaaattaatttcaaatttagtattatcaaaggccaaagttggttttgtgaaagatttacatttttgtaagctcgacattttcagagatttaagtgctatctcctgaccctagcaaagaccactgagcagatgaaatcatattagtaattgtggttctgttcagatattatctataagtgggttgtatgtctggctcagcagtcaaggaagtttcagaacttaaatgtaataatccattgattaccaagggaaaatttcaacaatcatagcttaaatactgtacaagaagtttgctgtgaaacttttaggtattgcttactcaagcgtgaatcttccatgttggataaacaaaggtgaacatttgcactaacatttgtgtttactttaagttttgtaagattctcagatttccagtctgttacataattttttttctaaatggttaatattattacataatagtaaatgccaatgttcaaacaaatatttttaacaattttcaaacctttattttccatggctctttgcagcgattggtgaacctgaaagtatagattggtataatcctcaaggagagaagataatttcaacacagagggtagtagtgcaaaaggaaggtgttaggtcacggttaaccatctacaatgcaaatatagaagatgcagggatatatcgttgtcaagcaacagatgccaaaggacaaacacaagaagctacagtagttttggaaatttaccgtaagtaatgtatttatatgttttagtttattcaatttcagttgcttataaataaccgaaaaaataaaatgtttgataacacttattaagaactatgtgctttgaaaataaatatcagtttatttatgctttaccagagtgtatcttagaatagaatagctaacagataataagtggttataaacatatatagggcatcaattatattaaataatattaataaaaatgttttcattttctcaagccattaagaattcactgggtatatagagaatagtggtttatttagtggtatgatatttattcagcattttttttttcactgtaaaatagaaggtcatgattagaataaatgaaaatgtgtgacagcactgaccattgtagaatgagaatctggggaagggtcagtgaacaagagtagtcagaaagttgaaactgatctagtagccaataatattgagtcaggattctttaccactaagtgtttttattagcaaagctttccacatttgcacttcattttatgtcctgggatggatttcttcctatgttcctttctcctccttatatttaagaaccattaacctgtttaggaacattgaaatctgttgactcctgcattttaaagcaagctatcccaattactttcgtgaccttgagcaaatcatgtaacctctctgtctttagtttcctcatatataaactgaggataataatggtacctatgtgatatatggagtttgagtactaccttaaattatattgcataaagtacttacaacaatgccttacgattaataggtagttagcatttctaccaatggtaaattatatatatattaggaatgcaagcccttaaatcatctcatatctgtagctttgtgttttgtttgttattctagaaataggatatgaaaaacaaagtcggaacattcctacagtaggacttcctgtttgatgaccaacgcaatttgtgggcacattgttgctcttgtgtttcctgatttggaatttttccctcccatttgattctgagcttccgaagaaatgatattttcctaatttatgtaaccccctagagtatctatttcacaatagcaaataattaaattgaaatggtcattttatagatataatgtttggaaatacttctttattttaaatgatgcaaaagaagaattgtgacatttgcaaaggtaaaaaaaatttttgcaagaacaattcattacttctgtgagaatttctcatcaagcataaatatccatgttcactcattcattcattcattcattaaagacacttattaggtgtgtatccactataattctgagtcctagccagagacagacagacaataaataaactgaaacagatacatagatgctagctaaacatgctatggaatcctatggaaaataaattacctggggtagagagatagagaaccttgaaatggaaaggaatattgctattttatataggcaggttggataagaatctgaatgaattgaaggcggtgcaaatgccctgtggtgagaacaaacttggaatgttcaaggaacctccaagaagacagttttcctgagtgacaaggaagagagaggagaaattgagattggagttgaggagatacactccagtttatacagaacctcatatggcattgaaagatctttggattttattctcagtgagataggaaggtattagggagaagtagattatctagtttaagattttaaagtatctaggtttccctaattattttattatagtatcaatagagtctggattatgttattgggagaaataagcaatgatacttttgtgatttgtgatttgtgatttgttttactttgttgatacagaaaaactcactttcagagaagtggtatctccacaagaattcaaacaaggagaagatgcagaagtggtttgccgagttagcagttcacctgcacctgctgtcagctggttgtatcataatgaggaagtcaccactatttccgacagttagtattttggtaactccctaagttatatgttctaatactattgcagtttttaaaaatctgaatctatgtgtctagttgtagaaatttgaatttttgaccccaaatattcaacaactattttgagaacctgtaagctctacattaggattttgcaatctagggatctcagggcaaattcactgccctttacccctatgttgtaatcaaaacacagttatgcccgttcaccacatactgtctgtggcagctttggaggcatagttgagaagctgtggctaaaaaaaatatacaatcattagcctaaaaaaatgtacaatcgttagcctaaaaaaaatacaatcattagtacctggagatttacagaaaaggtttgcagacctttgctctagtgtcaagaaaagatgaatacattataagcagtactaagtaaatgaaggagtacatcctgctgtattcaaattctgtataatttatacatgattctatggtatcactatatgtaaacttagtattgatgtgaattatgtttattattctggggcagtacgttcaaggttatctacaagttctaaatattatggaaagatccatatagataatagaaaagtactttcattcaaattgtcttcatgattttgatttagactgtgctaaaatttcagaataatatgacatctgaaatcgaatgtataatttgcttacattatgttcctttaccatgttcatagggagcattttcaatttagaattttttcaatgcacctgcacagcagagaggtacaaaataattgaatcttttaaagtagtttccatcttcgatgattctgatttgtgtccaagggatgaagattctacagcataaagaagagacagaaaataatatctatttttgaatatgtggggagaatgtatgataatcatgttcaatagtcacttttttaattttgaaagaatttttctgagcttagcatgttcaatgcttgtcagtttccattataatacattaatgagaaataacactttatttcctcttgttctgtttcagcataactctgtacagtgtattaacaagtcacatgagtaaatgggttgatgtatttttagctcttttcccctcaataataaagaaaaagcagtccttttgtaacggtggaatgacaatgtctaaatattttcagactgtctaatcttacacctcaagtgtaggtttattgtaaaactttattagtagaatattttgaagtaaattttatttttaaaagtcaaatagagcaaagcctcaaagcaaagactgatgacaacgggtagtggtgatggagaagtgatatttccatgctagagctcatacgtatttccccagcatcccaggactaaatgacgtacagccagatttccattttggctttcctcctttccttggccctgaagctttgaacatcttttctaaatgttctgtgcctaaatcagactctttatctgtaaaacacagatgattgccttcatttaaaataatggctttgtgtcataaatgagactttagacataaagtcctttcttgacatctatgggtgatttgttccaggacctcccacagataccaaaataagccgatgccaaagtctcttatataaaaagcatagtatttggtataacctatgtacatcctcccatatattctaaattacatctggattatccataatatcaaatacaacataaagactatgtacatggttgctatacagtattatttgggaaataaggaatagcctgtacatgttcaataaagatgcagtttttaaaaaatatatttttcatcagcagttgtttgaatccacgaatgtggaatccatggatatggggggtcagctatacttcatttgttaagtgaatgaataaaatatatggctatatattagattcttaataaatgacatgtatcgctctcattccttctctatgagtttttaaatcttggaatcagttttgctaaaattacatgtgtttaggttatatctagaaccagaaaatccaatgtagaagaaatgggtatagtttaacgtgaaacataacactaagttgtgtggcaggtgaaaaataaaaataaaataaaatcatatttttaactatagaatttaaagtattcaagtaaattatcaggaaggacacacttttctaaccttgaaatagtgtagaaacttatcacataaatcattattgaacaatttgtacatttataatagacttatatgaaataatattattcactgcttatacctcatatagtcctttattaaagctgatgaaataagatcaagattacaattatgtatgaggatttagaataatgccacggacccagatatatttattttgccataatctgattcaaaagtaaaatatagatattccagaggaaataatgaaagcttggaaatgctcatcttattagctatgcttttgattgtagctgcgtggcagatattcagaattaaacttcctgcagaaaagcagtggagattttccatgttgctcatagaaaggagatccgtatgctaaaggatccaagcattgtgggagtaaaggtgacattttattatacaagttgaatatctgtcatcgtgatggagggatatgctatttgctgatatccattcaatcttggccagtttggaaattctctcttaaactttttaaatgctttggccaacacctaattgatatactccttctgcattaaaaaaactgattaaaattaccttgttcaatacaatttttatataacctacttctagtataaaagattaattcaacaattatggaatacacaggatctatgctgtagtgtaccagatgattatgattcatggtaagcaagataagttcactgccttcaaaatactaagaatctagagggaaagataaataggtaaatcagtgtgagaacaagacacattgagtctatgataacgaaattgtggtaataaaggatgataaaataaatgtaaactacgtaggataagagagagtgtcaaagatgcctgccaggaggaaaaagttacctttaaatatacacacgtattagccaggcaaacgtcggtgcggaattttcaggaagagggaagaccatgtgcaatggcccagaggtgaaaagcagcatgaaagcatatttctgaaactggaataagtttattattactagaacttattaataagtgcaacttagatacttttacaaatgagtaaatctaactaggatttttaaacaaaggactaataagaaaggaagctgaagaaggaggtcaaaccaagtcagcacagccttgatatctgctactacggagtttgtaatttattcaaagggggcatcattaaagggatttaatcaatgcagtgacataagctaatatacagttgagaagaatatttgtatgtcagtgaaaacaacaaattagatgggagtcaaggcaaaactcctgagactcagaatagttcaggtcctaatgaaatattgctgagggagaagaagacttaaattaaataacgataaacagagaagtgatgagacatggagtctgattgggtctgcagactcagagagatgaagatgtcaagaatgactcgtggaatttgccttccatggagttccatcacttatggaatattcctttggcaactagttccatgtaaaggcatgtgaagacagaactggagaatgccaggtgataaatttcaggtggagatgttgagctaaattttaaatatatttttcctaattcacattaaatataatcagtaaaaatcattataggtgaaggatgataggtattttagaaagttagaaaatgcagtaatacaatgatctaagtatgatagtgttcctcttcattttaaattttatttatttataattgcctctcatctaaatttctgaacacacactttaagagaggatttttaattgactttgaaactttatgaagtttcaggagtttctggttatttcaggaccacttatgagttatcttctaacatttcttgtggattggttttctttctccccagtctttcttttgatgagggcatttcatgtttgtgctttaatttaccaggggaaagaatctgaataaacatttttgtctctcttcttaggttcaacctaaggaaaaagtgagcattatggaaaagtttacacctcatgggctgcaaatcatgtggccgtagcattagaatcactattttcactttgggggagcctctgaatctgtgcattttcacccctgattagttacctcttaaacaaaaagcaactacaggcttgtccgtttaatgagtatctatgccctgatgactcttctatttgttatttctagccccgacttctcccctctcattaaggaacggctatgacaaatttgcccccaaattggagtggcctactaccctagcagtttatggctcactcatgcaaagtccagttggcagcagaggtataggcaggatcctaccatatcctttccacgatcaggctgatggagactctgcctttttcacatgtggcttcaagtggttttcctaacctcataatcaagccacagatagggaaaaaagcagtacacattggaacaggcccaaaggtaaacaatagactgtagatatgttagaggctgggtaccttaaaataatcacctttctacctgatcaaaaatcccaaagggatagaggcggggtgtctcttattcatcaaagtgtcttatatacagtatccagcaaacagataatagtcaatgagatctatggatgtgttaattaaggaaattttagatattgcctgtacaaagagtttcaaaattggactatatgtaaaagcattctttgaatgataaggagagaaaaggttttagcatggcagcaagattgagatgcttataaaatcagggcagacacaaaaaataatgccaggctgagatgctgcttaggtgtcacagattactgtagcagattactttacacaatcagtgaatgcaggctgtataccagcttatttttttatatatgcatgtgcacacacacacacacacacaaatggaatcttgaaataaaataacaaaatctaatctatttattcctaatacagattatcttattagccaaaaaaatcccttgaataaatttgagatataatcttttttatatcctttatatgacttgaatattattatatcatttagttgcctccacagagacgcaaaattttttgtttaattattgtatgaagaaggatgttcaataaattttctagcccttttccacccatgttgccgcatatttgcagtcaaaagtttgcacatctgtgatacctaatctctctgcattgttcttttgtgtatcatttctgcatccaaagtaccaaggggaaataatagcctaaccattttatgtggatataaagtcttgaatgtattttattttattcttttaggaaaaaaaaaaaggtgtaacaaagcagtgtagagtggaaaaattgaagtcatgaaattacattttactttcaaatttgaatttgtttgctgatgaaaagcttgatagtgtcagacagtgccatattttaactcttaacaatttagagcactctggacttagccttcaattactgataccattttctcccctttgctttctttccagatcggttcgctatgttagcaaacaataacctgcagattctcaacatcaataaaagtgatgaaggtatatacagatgtgaaggaagagtggaggccaggggagaaattgacttccgtgatatcattgttattgttaatggtaagcagtaaataatttgtacatgttttatggattcattttagcaatgttttttattaaatggcaaccatgtgaactcaaaatacaagtcttatctaataaacctcttctataccaggaagaaatctttccatctttattatggcatctgtaacattgtattacagcctcaaggcaggatccatgacttatgttacattgtcattctcataacccttttcaaataggctatatgtgagtaattgccttttgctggaattgtagttgttgaaagaatatcaaataaacatagtacagtatcatactaaatgttacttttaaattacatgaattatttttgcttaaatttacatattttactctacatgtttctcaaatttaataattaaatttttaaggttatatttacaagtattaatggacattagtgactggttttatgaaatcatgatgaaatctcttcctccaaagttgcttctcctatatagttccttcctgtgttaacatgatattctatggagctggaaaatacattacagttatcttggctgtctcctgtactagcccattttcacactgctataaagaatactcgagactgagtaatttataaagaaaggagatttaattgactcacagttccaagtgactggggaggcctcaagacacaatcatggcagaaggcagaggagaagcaaaggcatgtcttacatgacagcaggcaagagtgcgtgagaaagagtgaagaaatgccacacttaaaaccatcagctctcatgagaactccctcgctgtcacaagaagagcatggggaaaaccgcctccatgatccagtcacctcccaccagttccttccctgggatacctgggaattattaatacaacatgggatgaaattttgttgaagacacagattttgttgaacaatttcatctccattttggcagtctaatctgttatgaagacatatccattgtatattttaacatctctcaaacatactctattttctctatcatgttgttttccatgagagtggtgatctaatttttttttttcttgaattcatacaacttggtttctctacacttaatctcacaattctacctttctctccaccaagactttcaactgtaataattcttcagtgtttctcactactgtcaagacaaaatcaaaacgacttttcatggcatagaaaacccattatgatccaccccttccctaagcattctgccattagatgtcagtcatagggaaactgggtccttagaggagatctagtatttttcaatggtctttctagaagtacagagtccgatatttattaagggtgccataatcagtggagtagttaaccttcagtgcgggaggaagatttcagtgcataaaggataggtttaaatagggagatgtctgtatctaacctttatctatatcaatatgtaactctttctctttattgtatacaataaacaagggtaataaatatatagtggctatttagtttgttaattattgaattgtctaccatactttgtatccaaaaagatttatgatgaaatatgtaagtgtatttcatcatgagcagtctttgtgttaagtacgtacttatgaaaaagggaattataataaaaattaatatatgtaaaattctttaaaattggttaagtttataggaaacagtatataagtatttcctattattgttattatatatacatataattacactaaaatattaattcaagtttgatattaaaatgaaatttatccagcaggcatagtaaccctttgttattcattctgctattgtagtttctactttaatatgtggttggtgcaaaagtaattgtggtgtttatcattacttttaatgacagacaccgcaattatttttgcaccaacctaatattttctttaatatatttatagcatgttgtaatctttttccctactagattatctgtgattattatgattacattcattttaaagaaatgattattcaggtatgaatattcttttaataaagtgtgaatcttcatgcccatcatggtctgcatttcaactggaatatttagttttatatttctatacttatttatttcaggatgtataaggagacaaatataggaatatgtttttatgtgccatttctgatcaatcatgcaaataattcctgttttgtctgtatcagttggaccctcccaaaagtaaattcttctcctctgtctcccactttcctctaacagaatcaaccatagattctaatatgaacatctttgctcggacattgataattagtctcatttttccctttaggatcacaaactcgcgtagcttaaaattcctggaatctcttttattttaaataacagtgttcataaaatcaggtatcaattgatttccgtctggaggatgcagttggacactgctgagagaatgcattgactaatgccatcagacgcctgtgcttttctctcacattttgccttaagacagaaaaatcattttactccagtcttattgactttcaccctgcttactggctccttttaaatatcgaggtttttttttttgaaagttttcccttattatgcctcttttataaaactgcttaaagatgtttcagtgaaaattttgaggctgcaaaaaataataccaataaaataaaagtgctacttttattcatattatttgatctttaattactttgactttgactgctgccctattctgttcctctcagtttacattcccagccctctcacttaattgctactaatttttatctttaccaatttgacatttattctggtcctctttcattcatcttcttccacctcaagtataccgaagtcctacccaaatgccccagtcaaatgttttttcacatgcagcgcttccttgtcaaatcttggccttgtaggaggacctgccctttattctacgttttgttcttgcaaaacttttccatcacatttctatcctaccaattcatactcttttgttcaccaattagttgaaagatatccttgctggcttcctctgtagtaccagcaataatacatgtttaggatcttattacttcctttattttttcttacctccctctgtgactttcttaatgtgtttttcaatgcctgggtattgtttttcacaaatattcttcccctcccttgaagaagattatacaccaatgcctttgatatgtgaagtatggcgcctccaaaggaaggattatgcatcttcacccagtcgatcatgtgacttgctctagccagtgacttagaagcaaacaaaatacacaccatgactgaaatcaaacttcaagaaaacatcacatattttctctttttctcttgtttttttccttccgccatgaaaagagcatgacccaaatagggacttacccttcatcctgggcaccttgatgaacacaggaggagcagattacagttgatctgcaagtgcagacaacataacatgagtacaaaataaagtatatttttaagcactgagattttaaagttgttatcatacacacacacacaaaaacagacaaatgcaaaactagtgcttttgtctgtttctctctctctctctctctctgtctttaaacaatcaatttaagcaccatctgacctaggtgtacttttgaaattacttaccttggtgtcccttttcactttccctgatggtgatcatttatgacaaatttttgtcaccttattgaggtattgaaaatttagctgaagagtttttactgtcatttcaaaattattttatattgttttcatatatttattcaacaggtatatacaaagtgctggctatatgttttacactatattgtgcttggactactaaaaggcctaacacagcatcatttccctttagacacttagagttgtagctcaacaatctgtaagaatcaactttactaaagtcctttattgtttatggggtagctggattcaaaagcatttaacaaatgcagttttcctagatattcacagactattttttgagaatggaaacccaatgcagctgaagacaggagagtaccttggtattaaagataaatataatgaaggaaaactgttatttaggagaatagggcaataatatgttgcagacagaaagaccaacacttgtaaaacaaacaagagcataagttgtgaaaaaatccaagcacctaactgtgattgaaatatactgttttttgacaggaataagaacaatggtgtgttggttggtttggagattaggtggaggtgcagctgaaaagcaggtagcagtcaatcatggatgaccatcgatgctttattaaaaacctgatttatgggacaaggaagagctgccattgagaagcaagtaatccagagagcaagggagttgacacaaggatattggcagggagaaaaagtgagttcatgtgagagataattggggcctttactaaagggcaaggaaatgaagaggaaggcgtacaataaaactagatttcaaagcaaaatcatcatgttatacctgtgtcacagaggcaagaggaatcaagggtaattttaagacttctagtgtgggttttagggcttccagttatccatgcaagcaaaaatgaccaatacagtgtgcacaaaaataagtgtgctgaatttagagattatgaggttgcaagagacattatggtagatgatactgcttatgttctctgtgttaaattcagattacaaggacttgaagcataaaggtacacatatattttttaaaggatgaaagctaaaaaaaagttaaagacctgctacctaaggtttttggacttagctattaaatggggaacatcacaaagttgagttaatgactataggatgttgttgaggctttaggacaatattaaggaatattaccttgaacataaggagaatatattttatattgagcctggaggaaatgagttaaaaaatgagtaaggacgtgcataaattcataggtagatttggtcaataatttgagagaaatcctgctacatgacttcagtattctattttcagttagctggttgccctcaccgaacaaacattgatataatcttgatagtcataaaaaaattttacttgcttatattaaactttttattggatcttcaggtaagctctccaacctgcctaaaacctttctgttcatgaacctctgagtaaatgctttcctcatatcatcataccttgtttcactctgacatactatgtgaaatcttttaaaaacagattaacagagacattgactgaattgattggctaccttttccataaattcatattcttttaactagataattgtgctatacatatacacaaacatgcccacttacacatcatggatacgcttttctaaaagaggattaatattgtctctcttactttaacccacatatattctcccaccatctgattcctaggctttagttaaataatacacactgtactactcaaaaaaaaaggctcatatagatgaaagacctggaaataacttttaaacttaaaatacagtcagtagagtgttcattttataaaatgttcttctaacgtatagtgatttattattttatgaatattttgtaaatttgtaaagagtgattcactaactgcaggttcaaattggggtaatggaggcaggaacaattgagattggataaaaaacacctagtaatgcaattgtaaagcaattgtttctttagtcgatctttgaacagtaaaatcaacagtgggtgataatggccagagatgtccgtacaaatgagtgtctgaatgtatagtgcactttgttatctcagtaacccccaggcagtaatttttgtattcctacctatttcttgcaatttcttgaagtcatgaaaatgaggcaaaaaaacttttctatttataaaaaatgaaaagttaagtcaaaattttctctttaagttgtatgcagtgttttagaatgtaaagcatatacaagtatgaaagagtgaatttgtctcttgtagttgaatcatgtaattgaatcaaccatgcagacagctattttaagtcagtttaatgagtgcaaattatgagggaatttgtagtttgtaacaatgttatataatatacaatatataaatttacccaaatcaataaatatttacccaaaccagagtattttatagttttattaattgtgtatccctaatgattttattaaatttcaagaataggcaatctgggaacacaagaaaagaaaagtatatctttttctccttatctcttatataactgttacttcagaaatttttagtttatataaactagagaaatgatagatacagatagatagatagatagatagatagatagatagatagatagatgatagatagagataatctgcacagatctaggcacatctttctttgcttttctcttccatataagtaattgatttgagtatttaatacagttcttttccttaagtctctatttctcttttactcagattttctaagtacacttagtgtcataatatcatatttgaaaagctgtagaaaagcatgtattgatttttcaacattgtacttttaatccctgattaaatatatggcagaattttctcattgtttgaattggattcccattctgaatttatctgtttcaagtgtaacagtcttctgcttgttgattaggggctgacctttgtatgttgttctctaaaatttatttgatgagtacagaagtgaatcctatcatttgtgaaaccacaacttatagaaatctatagggatcacaagatactgcaataatgcaaatttttatcatttcatagaatcaatcagtaaaataaaagtcaccatcaagatgccatctgacattgtggagatgaatggcattcaggaaaattaatgtctaaataactttggagagacattcatgggtcctgttcctcaaaatgtgctgcactagaggataacctatgaaaccatatcagtattttattcacactgaaattcacgaatgaccagtatcaccactatctcttgccttttttttttttgcttgtgtcatatcctatggcttttaataaaagcataggtattcggagaatgtctgtttctgatggtgaaagtaataaagcagagagaattcaactcacgttacataaaaatgaaataaccactcagttataagtaaaactagttccatgtgctacatcatcttcttaagcatagtttgtttttctttttatgcagatatgcttaatttctctaggatgagatttcacaatctccgtctaaaatgtgattctctctctctctctctttctctccttccctccttccctccctccctccctttttagccagactgattgctatttgtcttataaaacttagtccaagcatcatttctagaactagaaagcaattctaaatatgacctgccttattgcaagatttcttcccatgagatctcatagtactaggtccactctgtaaacttttcaacgcttaagtatttgaaaggactcagcaggcttcacaaagtacagttgttccttggtatctatgggaagttggttgtaggaccaacatccatgggataccaaatccatgaatgctcaagtccctttatgtaaaaaggcatagtatttgcatatagcctacacacattcttcccatatactttaaatcagctctagattagttataatacttaatacattgtagatgctgtgtaaatagtgttacactgtattttaaaaaaattgttctatttttattgctgtattggtattttaaatgatttttaaaaatatttttgatccctgcttcgttgagtcctcagatgcagaacctggggatacagagggctgactgtatagtcatgtaaatgccctattcttaaaaaaaaggatatggtgcagccagaaaaagaatgcaaagtgtcagacctgtgagagacaatcccctgcacaagatttccaggggccctatttgcaaacaagatgatgtgtatgttcaccttgaaccacgaagatccaaatgaggcacctcaaagagactctcaggtagagttctttaagtaatttagccaagcttcacaaattgtttaggttgagtccaaactatcagtgcagaaaatgactttggaggttgccaggaaactttctggtccatcataaattccaatgtccttaccttggccaaaagtcatccacgtatctttgaagatattgatagaacttttccagctgatccagaaaccaactccattccacagcctctttacaatgtacctttcacactgacttgaaattatccatttatgtgtgacattatctcacagataacaccattaatccttcaaggaaaaaggtgatattttataaccttaaggtatactgtagagatttgcatacaggaggcggtctataacttctggaaagatttctttaatttttaattattttgtgcaaatatgtgattatctcaatcacaaagatattttatttcataattattacttagtttttttctctatccctttagattatataatccaagttattttactattatcttgagaacatttcctcctcaaactatcaatctagtaatgcacttccagatatcttgcatgtattttaagtttgtcatgtacaataatctgcatagatttaaaatttcaacatatatttattaatgtatgtgtatatatagatatgcgtttgtgtgtcggaaaaataatcaccacggatagtgaatatatcttcttttgagaagtatttgttcgtgtcctttgcccatttctttaaatgggattgtttgttttttgcttgatgatctgtttaagtcccttagaggctctagatattagatctttgttggaggcatactttgtgaatatttcctcccattctgtaaattgtctgtttattctattgattgcttcttttgctgtgcaagagctctttagtttatttgggtccaacttgtcagtttttattttgttgcagttgtttctggggactcagccaaaaattatttgcgaaattggatgtctagaagggtatttcttaggttttcttttaggatttttatagtttggggtctttttttttttctattttttttttttaattatactttaagttttagggtacatgtgcacattgtgcaggttagttacatatgtatacatgtgccatgctggtgcgctgcacccactaactcgtcatctagcattaggtatatctcccaatgctatccctcccccctccccccaccccaccacagtccccagagtgtgatattccccttcctgtgtccatgtgatctcattgttcaattcccacctatgagtgagaatatgcggtgtttggttttttgttcttgcgatagtttactgagaatgatggtttccaatttcatccatgtccctacaaaggacatgaactcatcattttttatggctgcatagtattccatggtgtaacaaatttacaagaaaaaaacaaacaaccccatcaaaaagtgggcgaaggacatgaacagacacttctcaaaagaagacatttatgcagccaaaaaatacatgaaaaaatgctcatcatcactggccatcagagaaatgcaaatcaaaaccactatgagatatcatctcacaccagttagaatggcaatcattaaaaagtcaggaaacaacaggtgctggagaggatgtggagaaataggaacacttttacactgttggtgggactgtaaactagttcaaccattgtggaagtcagtgtggcgattcctcagggatctagaactagaaataccatttgacccagccatcccattagtgggtatatacccaaaggactataaatcatgctgctataaagacacatgcacacgtatgtttattgcggcattattcacaatagcaaagacttggaaccaacccaaatgtccaacaatgatagactggattaagtttggggtcttttatttgaatctttaaaccatcttgagttaatttttgtatctgatgaaaggtaagggtccagtttcaatcttctgcgtatgaccagccagttatcccagcactatttaatgaatagggagttctttccccagtgcttgtttttttggccttgttgaagctgaaatgattctaagtgtatgatttttctattctgttccattgaactatgtgtctgttttttctgtaccagtaccacattgttttggttatgcttatcatcactaatcatcagatagatgcaaatcaaaaccacaatgagatactgtctcacaccactcagaaggctattattaaaaagtcaaaaaagcaacagatgttgaaggctgcagagaaaagggaatgtatataactattgttggaaatgtaagtcagttcagccactgtggaaagcagtttggagacttcttaagaaacttaaaacagatatactattcaacccagcaatctctttactgggtatatacccaaaggaatatagatcattataccaaaaaggcatagagacgtgtatgttcatcactgcactattcacaatagtacacacatggaatcaacctagattcccatcaatattggattggataaataaaatgtattacatatgcaacatgaaatactatgcagccataaaaagaatgaagtcatgtcctttgcagtgacatggatgaagctggagaccataatcgtaagtgatctagtgcaagaactgaaaaccaataccacatattttcacttgcaagtaagggctaatccttgaacacacatgaacctccgcatgggaaccatagacactgcagaatactagagcagggagggagaaagggaggcgtgggctgaagaacgaccttttgggtactatgcaaactgcttgggtgtaatgtgcccatgtgacaaacctgcacatgtacccctgtatctaaagttgaaaaaaaaaagaatataaagctttaaaaagaagtcagaagtggaaatgaaaacatagtaaactttatgaaatgctaaaaaagatagtgactatagtgaatgtatctattatccataataatttctaaaaatgtcatataaccgtgcaatatgtattttcttttaagtggattcttacccttttttcactcaaaaattattttgagattcatttatgttatcccatgccataatatgtcatctctttttattgctattagtattcaattttaagaagatttcacaattttcttacccattcaccaaaatggcttttgggaagtttcagatttttggcttacaaatatatacatatttatatattatcttggtatgggcatgtttttatatctcttggttaaatacctgtgagaggtaatggctggatcacatgccaagtgtatgtttatcacttttaaaaaacacttcctaaaagttttccaaagtgattgtactattttaccttccccaaagcagtgtacgggtatttcgggtatttcacttgctccacatcctcaccaaaacttgacatactcaggactttatgtttagacatcctaatacatgtttagtggtttcatgttgtggatttaatttgcatttccctaatgcctcaggatgttaaacatcttctcatatacaactcagcattgatcatttttggtaaaatgtcttttcaaatatttaacgtagttttaactgggctgttttcttattattgagtttactgaattctttatgtatttggaatgtaatccacttaccaaatatgtgatttagaaatatttttatccaatctgtggcttgtttttctattttttaaccactgcctttcagtgggtgaaagatgttgatgaggtttaatttttcttttttcatatgaatcatgcttattgtttcaaatctacgaatgtattgtgtaaaacaaatatgttaatactaagattttccccaattcttctttctagaagttttgtagttgttgtttttaagtttagatttatgataattttttcttaatttcttacgatattgtgacaaattggcgaaaggttttgtttggtttgttgtattttttttttggcatgtgaatgtccgatttttcatcattggctaaaaacaccgtactttagcaacagaattgccttttcattatttaaaatatattttaatatatgtgttttagggaatctattctgttccattgatctatttatttgtccctttacaccaacaaaagccgttatgataagttagaataatgtattataagtcctccaactttgttcatcttttcaaagtagttttaatatagaataaaatactctaggttctgttcatttccatattaattttagaatcaagctttcaatttttacatatacatatgcactaacacacacatacacatccactaccataactttgattagaattgtgttgaagctatagatcactttgagaataattgtcttcttgacattattgatccttctgttccagaaacagaaaatctctgtatattcaggtctctttaatttctctcagcagtgttcttaagtgttttttatacagtcctaactcatcttttggcagatttatctctaattattccatatattttgatgctattataaaccacattttaattgttaattgtagcatcatatataaagatagataatatattctgaaatgtactaaattcatttattatagtagttcataattagcttatggttccgtagaattctctacataaatgataatatcactgtgggtcaggcacagtggctcacgcctgtaatcccagcactttggaaggccaaggcaggtggatcacctgaggtcaggagttcaagaccagcctggtcaacatggtgtaatcccgtctctattaaaaatacaaaaattagctgagcttggtggtgggcacctgtaatcccagatactcgggaggctgaggcatgagaattgcttgaacacgggaggtggaggttgcggtgagccaagattataccgatgcactccagcctgggcgatagagcaagactttgtctcaaataataataataataacaataaaaataataatatcactatgaataaagacacttttacttattcctttccaatctgtatgtttttccactttcgcttattatactgggtagacagactctcctggtgaatagaaatgatacaattgaacacacttggccttgtccataaactttgggagacagggcattcattcttttaatatcaaatgtttttagatataggcttttcagggatttttaaaatcaggttgagaaactgaccttttcctaaattactgagttttttttatcaataatgaatttttctctgtctgcctcctttctgatcagactggatagagttttattagttatattgatctctcaaagaaacagcttttggtttttcttgattttatatttgtttttccttttcctattttatcagcgtgccatctgatctttattattttatctttctggcttatttggaggtatattgatctttttttctgttttctcaaggttaaacctgataatactgatttgaaatctttcttgtcttctaatgcatgtatttagtgctgaataattccctatatgtctacttcaactttatttcacaagttttgatatattgcatatacattgccattcattttaaaatgttttgtaatttcccttttgacttattatttatcccatgaaacatttagaagtatgcacttagcttccaattatatgtggattttccagagatagttctgtcatgaatttctaatttgattctaatgaggtcagagaacatactatgatttagatcaagtatattcctgatgcacttaaaaagaatgtgtattttgttgatgttggttaatgttttggtaattatcagttaggttacagtcaattggtaatgttaatcaagtcttctgtatctttttaacctacttgctctattagttattgagaaatagctgtttaaactctaataaaattaagaatttgtctatttcttttcacagttctgtcagtttattctccatgtattttaagctctcttattatatagataaaagtttagaatcatgatgtcctcctgatgaattgacgtctttctcattaggaattgattctgtttattccggataatatttgctccaatacctgagtgttagcaatatagctaccccagcattttttgcattaaggattacatggtgtatcttttttcctttcttttaattttaacatattttaattttgagggaacatagtaggcatatatatttatggggtacatgagattttctgatacaaggatgcaatgtgaaagaagcacattcacatgagaatggggtatctatctcctcaagtgtttttcctttgagttacaaacaatccagttacactctaagagattttaaaatgtgcaattgcattgttattgactatagtcaccctgttatggtatcaaatagtaagtcttattgattctttctatttttgtacccatttaccatccccacctcctcccccaaccccctactacaattcccagcccctgttaattatccttgtactctctgttccctgaattcaattgctttgatgtttagatcctacaaataagtgagagtatgcaatgtttgctcttctgtgcctggcttatttcacttaacgtaatgatctgcagttctatccatgtggttgcaaataagcatttacctatacttaaagtgggtttttgtaggatgtgtacagttgtggttttttaatccattctgacagtctctacctttgaattagagtgccacacattgaatatattactgatgtaattgggtttaagcctattacatcttgctatgtattgtctgatatctgttcatagttttatttttcttctgtttcttcatttttgaatattttaatgaatcaattaatttcctattttgtcttgttaactataactcgttcttattttagtacgtggttttcagtcttttttcaaatgctgttgcactacttcacatataatgtaaaaaataccccctccagcctttgtgctaagtttatcagatatttttacattaatcataaaactcataatagttttctatttctgctccaacaaattacaacaaattttgtggctcaaaacagcagaaattaataattaggtcagaagtccacataggctctgctgggatctgctcagtatattataagatcacgatccaggggtcagcaagactatgatcttttctggaggctctgaggcagaatccttcctaatgtcattcaggtttttggcagaatccagcctctttcttctgttggactgaggtcctgttggcttgcttgaagtcacctgcaggagggtgcctttacctttgagcaattcccttctgaaccttgaatgggaatctctaaagctctgtagcagcagtatgttaaatccaacccatacttggaatatttctgacacatctctcttctgctgcatctcttctgccttcctcttcttcttacagctgaagagaaatctctgcttttaatatcagatgaaaaggggatcatgtgattggtctcgcctagataattcatgataatttcctcacttaatgtctgtaactttaaaaaacacctgcaaagtctttttaaatcatgatatttaatgtgttcatagatggccaggtgttagggcattgacatctttgggaagagacattattcttcccccaacaactgtgctatgcatacacacatacacacacacacacacgtacacacactatgtatagattcaaacttccaattagctcatattcataaattattacattaaaattaatgttaaagttattagaaaaaagtattttatatttatctacatagttactattcacaaggcttttcaatactttgtgtaaatccagatttctatctggtataagttcccagatgcttgaatgacttcctttagcatttcttgtagtgcacttctgttgttaatgattcagttcacctactgtatgtctgagaaaacctttttttacttttatatataaaatacatttttgctggatatagaattctaaatgaacagattttattttttcagtactataaacattatgaatcattatgtttgcctgagtttttttagatacaaactcctctgacattttgttcctctgtacataaagtatcccatccaaccagtcacccccagattcttagagatttttgctttatcgcttttcttaagcagtgtggatacattataccttggtgaagctttcttcatcatacttgtacccaggttttggtgatgaccttgattgatcatttttaacaaatttagaaaagttttagtcattagatgttcacatattgttctctgtcccacattcctttgggactccaatttcacatatataggctacttgaatgttccaactgatcttgatcttatctttcattttccggataattttcagaaaataatcttatctttcatttttgatcattttctttcctttttttcctttttgtattaatttttggatattctctcttattacatgttctagtttactaatcttttctttggcaatgtttaatccactgttcattctgctgaaggcttcatctcaggcactttagcttttaatatgtagacacatgatttttaaaatacctaccccagaactgaaaatgaaaataaaaataagttaaatttctgtgaagtcttcaacatgatcagtctttcatctagatttttggttgcatggaatgccatcataataactgatttaatgttattgtgtactatcatctgttattcctgggttagtttttggccaattatattttatcctcattatatcttatatttcctgcttcttttcataataattttagcatggatgctagatgttataaatgttacctctttatctgctgtttttttgttttgttgttcttttcaatattttagaccttttttttctagaaatacagatgaactacttggaaacagtttaatccttcagtctgtgcctttaagctttgttaagtttgatcagaatagctctggactttctttgccccacccatgagataagaatgtttctgaattctttatctgtcatgcattaggagttgattttattctggctcatgagagtatgaacttttgtttgctctgtttgagcttggaagttgttccttccaattcttttgcacagttctttccctggcctcagttactttcctctcatgggtgcactcatcagtactcatctggaggctccagggttaatcactgcaaatctcagggaatcctcactttgccattaagtcctgtctggcactgtggcctgtgaactatagccaatatccacttctctgtactattagcactacctccgcactcagagagacctctaaactccaactgagatcctcattcctgtgctgcaatctagaaactctctctagacagtaagctgagacacagcaggactcacctcatttccccccatattttaggaatttctattgaatgatttcattgactgattcacaaagtcttgaaaaacagttgttttatacaatgtttctgacatttttagctgtttcaggtgctaagataaattgggtatacgtttctgcatcttggttggaaactgatatttttagatatatgtttcagtacagcaaacaaaatttcagtgttctaaggttttgaaaaatgtatcctagtaataggaagacctgacttctaaatattttaatctctcattctgtactaaactcaaagcaatttcagatagctatgtctgaatttcactttcttcctactttatccatacatcttgttctataataaattatttttattaattaattactttaattctccctcaggtttgccagtgaatttttaacagcagggtatcacaatggttttttcaaaatatgtagcactatgaactgaaacatggcccacattttaggtgtctcaggaacatgaagaatatacaaccagtgcaatctgaagttcataacaaagacaaacagtaggaagtgaaggaatcttcagaatactttgggtagatcagagcaatgatttaaagaaagagaagagtctgatgaactgaagtagaaacaggcattccttgaagaagagtcatgattccctcaaataggcagaattaaaaatgtttttctgctttagatcaggaactgacttctccaggaggatgggctgtttcagagtatcagcttattgaatctgattgtaactgttacaaaacacaatgacaattttttaactatcaatatgatttttaatatttgcatgtttgttttcaagttaacatacagtaaaattcacttttttaattgtagaattctatgaattttaacgtatacatagattcatcttggctctactacagtcagtatacagaattgttctttcaccccaaatcactctctaatccctttatagtcacttcctctttcaacctctaaactctgacaaccaccacttctttccctgccattataattttatcttttccagagtgccatattagcacagctttagaacagctttatagtaagtcccacagttgagacctacttctcaggaaatatttctttcaaaatatcacagtgcactggcaatgcacttaaaatcaggtagtatcatttatccaactgttcttttacaaaaggttctagaaattataatttatttgccttccattgaaagtttcacaacaatttgtctacacaaacatatcaagctgggattttaatcacaattgtaaaggagctttatattagttttaaaagaattttactttttttctatcttgagtctacaaatatattaacatggtatatatttttgttgttgttgttggcctagtgtttgggacatcaatatgcttttgttaaatgaatgaacgaataacaaaaatgactttatgcaaaagatggttacaaatatggggcatttttttttttttttttttttttgagacggagtctcactctgtggcccaggctggagtgcaatgatgcaatctccgctcactgcaagctctgcctgctgggttcacgccattctccttcctcagcctcctgagtcgctgggactacaggcacccgccaccacgcccagctaatttttttgtatttttagtggagacggggtttcaccgtgttagccaggagggtctcgatctcctgacctcgtgatccacccacctcagcctcccaaagttctgggattacaggcgtgatccactgcgcccggcccatggtatgacttcttatttactaaagtcttcttttgtttccgttatcagatccttgtagttttcaacattcagatatcatacataaattttgcttgattggtacctaagtgtgatagttttggagctgttgtacatttttttaaaaaaaattttggtttccaaatgtttattgctaatatgcatatgagatttgatttggggtgtttttctttaatcctttgactgtgttacactcaacaattagttctagcaatatttttgaaggttccttgagtttatattgtatataacaatctatttctaatttctgcaaattggaaaagatttctttcttttctgactgtacgtcttaaatctatttttacttgagtgctgtgttgttctttcagcatgaggtttaataggagagctgacagcgaatttccttacttgctcccagtcttacagataaagtattcacttctttacctatatatcaatgttaggtctaaattttttggcaggtgtttttcatcatgataaggaagtcttcctttattcatagtttgctcagagattttatcatgagtggatgaggaattttgttgtttttttgttttagcatcaactcatgttattacatgattttttctttaaactgttaagttggataaattaattgagtattgattaatatgcttaatatagttaatataatttaataatactcaatatacttaatataatttaattatcttcaattaatttatccacctaacagtttaaagaacaattatttaataatattaggttcagaggtttctgaagctctattcattaatgtcatataattaaattatattaatactcaattaatctatccaacctaacactttaaagaaactgtttgctgataacagtattgtgtcagccttatattcacaggaaaaagaaaaaaaaacttaatgttgatatatttcctatttacagctagattttttttctaattttttaataaaagcacctattttccatgaaatattggtatgtaggtttattttcttgtaccatatatgacatgttaaattatcagcataatgctgtgttcataaaaatgggttgaaaaacattccctcctcttatattttctgaaagagattttacagaaatgctattgtttcttctttaaatattttttaaattcaacagataaactgagtctgaacatttcctttcaggagacttttgatttatctttaaataaatgtattttttatatttctttaataattataggattgtttttgttatatattttattttgagtaactttgtggtttctgattttcaaggatgtggttcgtattttcaacattgataagtttgtgtgcataatgttatctggatttttttaaatatttttattagctgtacaatctgtgctgatatctcttctttcaatcctgatattggcaatatgtgtcatctctccttttttcatcctgagtcttgctggaggtttaatcattgtattcttattccaaataaacttcatttaaaaaaattttctctattttgttctgttttcaatttcattattatccttttattttatattgttttcttcctcctgcttaatttttgcttattttgctcttgtttatctagtttattaggctatcccaaagagtaattgtgaatttgttccaattttttttgtctgtcagattttgctttatatattttgaagcactttttcaagttgaatgcacatgtaggattgtcatattttcctgcttaattggcctttttatcattatgtaatattctattttacatcttttaatttcatttgttctgaaacctacattttctgatattgacatagccactgcagctttcttttgattagcatttgaatggcatattttttctattgtttttattttattctagttttatcattacatttcaagtgatttcttatagacagcatatagttaggttatattttattcattatgccagtttctgtgtttttattcatgaaattaagccatttacacttcattcagatttacacatcattcatttaaaatgttattttagtctgttctttttgtctttcattcttctattttccctgctctaaattcttgattattgaacattatttagaattgtattttactgtatctataatgtttctggctatatctgttttcacaatttgtggggagggggtgttgccgttgtaattcaatgtccctatttaagttagaatcaatgtttaccatttcaatttgaatgtagaaagtatagcatcatataggtccctacatcttctctttatatcatacttttcctgtgtattatacctccattcattgaaaattccatcagagaatttgttttattctttcaaccattaaattactttaaataacttaaaaagtgaatagtgtgacatatttctcagatatttaccgtttgtaactcacgttttatttctggagtttgatgtttcctttgatttaatttcttttctcttttagaaggcgccttgagcaattcttttgtatcaggtctgctggtagaaattgtaatagttttcctttaccttcatgtctgaaggggattttgctgaacatagaccttgctttgacaggtgtgttctttcagaactttataaattttgtttcatttccttttggccttaatgatttctggtcaaaaaattcagtcatgtgaatcattcttctcctataactattgcatattttggtgtttgtatatttttggtttttagaagtttgattatgatgtgcctcaacatgaactgttttgggtttttcttgggttcgatgctgttggcctatttgagaagttttcagatgtcagatgcattgatacatacacatatgtacacgtatatacctacattattttgtcctggtcgtctttctcttttccttcttggatttcatgacattttggtagtgtctaagaagttcctgaagtctattcactttttcctttaatatgtttccttttgttttcaaaattggataacttccatttgtaattctttatgtttgataactctctctgtcaatcaattcagcacatccatgaattttgttgttgttgttgttgttaacataagtagaatgctaatatttatttggggttttaaaaatatatcgtatgtctttggagagactttctatatttccatttatttcacctaattatttagaacatgttttaaacagttgctttaaaatagcttttagataatccaacatgtgtcagcatgccattggcatttccaatgacatgattttcctagttcttaacaggtaaaacaatagattatctttaggactttgaatattacataatcagactctggatcttatttcagtattacggaaaatgctcactttttttgttgtttttgtaggcaatcagtttgtttagatcagacaacaaattctgaccatctttcttggttttatattcagacgccattttcattacctttcagtgactgtcagatctgtcctgcatgtgtaccaatggccattccaggacccatatggaggtttaccttttagttaaattcacaaaatcttagcaatgtttagaatccgattcaataagcacaggtcaggacagagctcaagatttcctaaagaacttgctgtggatgccttcctaagaccttcctactctatgatctctgacatactttcctatttcttaggtcaccactttttagtcccctggccagaaagctgcgatcttatttatctctctctgccccaactatggccttattctggttcaactgatgagattaatgaggaggataaaagcaatgggagattttgctcttaggactacagtttatctgattgaagaagaatgtcatctctcagagaattgggtgtttgcagctttcctctgttgacattgtcactgccagatttccttcctgcttcctgagtctgaactggaaggcttctctttcttggacatttctagagcagtgttgatgacaacttctgggttttgtgatgccttcaatccaggccatggaattctgaaaagaaaattgttatctcacagtttgtctggtgatattttaaattctgttatatttcttaatagcaatatgtctgctgcgatttacttttaagagtcttcaaatagatgacatacatattctatccaaatatattggtcatattaagtggggagataggacactgcaagatgtctcgaattaatccagaactggaattctgtgattacttttaaacttgttgacatatatatgatcagagccttatttaaacaataaggaattaatatatatattaacaaagtgattttcagatgcttacttttttattgatatttaattgatcacttcagtgtgactttgaacatttagcccacactttaggattcttactgccttttgaaagctgtgtatttaaagccatacttttcttagttaatgggataaaaagtaaaagatttataggggagaaaaatgaaagtagttccaattatttctttctggcagtttatcaaaggtggaaataatgctgttcttacaaaatttgttattttatttacttttttattattatactttaagttctagggtacatgtgcacaacgtgtaggtttgttacatatgtttacatgtgccatgttggtgtgctgcacccattaacttactttaaaaacatgcaataataacttgccaaaattgaaacaccagatcatatatttattttttgtattattaagatgttacagtaaaatgaccagttttaaaaaccaagatgaccctttctccaacatctccatcatcttccaattttatcttttattcttttttttttttttttttttgagacagagtctcactctgttgcccatgttggagtgcaatggtgtgatctcggctcactacaaccctacaacctctgcctcccaggttcaagtgattctcctgcctcagcctcccaagttgctggcattacaggtgcctaccaccacgctcagctaatttttgtacttttagtagagacagggtttcaccttcttggccaggctggtctcaaactcctgacctcaggcgatctgcctgcctcagcctcccaaagtgctgggattacaggcgttagccaccgcgcccggccatatttattcttgatatataaataaaacaaatatagcccctgtatattggtccttggaccattagcacataaaccccccggtgccaaattcaaaaatttacacatccgactgttttaaattaccctgcataagcctattttaaacatttacaatcagcctgctttggaaactgcaaaactgcacctaacttctgctagccatacacaaactccaagggcaatacaagacaccaagcccacagctgcccttctaccttctgagagagtctgagagacgctgctgtactgctgagtgacatcacgtggacacattatccccctctcagattcttcactcttccaggagtttccttccccttctcccactctctgagtggtgactggacatggtgtctttaaacagcctcctgctatcaggaacttccaatgtcaagcaacttgtatgagtagcacctaagtcaaactcattatgtgttaatgcctcctatcatcataagtttttccttgatgagtcctgaaatcttcacacttacttatactttccaacagattattttctgcagaattttgcaaaaatgagtactaccaactctaaaaatacgttctgaaatcttacacctttagattacttttaaatatacatcatgacttttattatacattatttttcttataagttttatatgattcttaaaattaattaattattttttttgagatagagtcttgctctgttgaccaggcagtgacacaatcacaggtcactacaacctcgacttcccaggctcaagctatcctcccatctcagcctcttaaatagctgggagtacaggcacacaccatcctatcctgctaattttttctatttttttgtagcgacaggctctcattatgtttctcaggctcatctcaatctcctgggctcaggtgattctcctgcctcagcctcccagatcgctgggattacaggtgcgagccaccaggccttgacttctttttaaacttgaattaccaacttgtattctagtccattttgtaccccaggtggtcccaaaacttttctttaatgtataggttgacataaaacaggtgaattctcagatcagtttctgcaatcagtctttcctgatatattttagaacctgagaaagacttttggataaggagataattgaactttttctccattagcacaatccaatagctgactttctcaaaagaaaatccatctgcacacagatacatggttggaaaaggggtgacccaagagagtttctgaaaggtgtttgggacctcaaggtttcttgaaatactctgagggcctttcatgtagaatattgttaactgtagaatatacgctgaaagaatataaaaattgccatgtttagtggtgaaattaactttcaagaattaaaggaacattcaagcttgaatttatttatttatatatttattgacttgagagatcttccatattaactatggccttttatttaattattatctcatactgtggaaagacttcttttgacaaaaataaagtcacagtaatgttttacctcctttcaactgtaacttttcacttagattttatttaataagccctttagattggtggtaaaatgtcgtagacatctagtgatggattagctttagtaaattgtattaaaaaatctattaacatttttatttttatgttttttaatttgttcatttatacttctctgattataaaaataatccaatgttagtatagaaaattgtataatgtctactgaggacatttcaaaagagctgattatattcttaaatcaacatattaaatattcatttaccactttacctatgaatttcaattatggttaattaaatatagaatttattatgtaaacaaatgctgtaatagatatgtatctggtcatatttggccaggtgacttatacttgcccaatagtgtatccacagggtttggaatactgatcagtttgagtaagagtgaagacttatttatatattgacataaatatgtctcttacatgtaatgtcagcttgataaaagaaacagaatacagaagcaggcgtatttttaaaagaaagaaaaaatattgaaatattaatcaatatttgcataaataaatgcatatgctggccaggctctgtgagacactcctgaggcaggagtactgcttgagcccaagagttggagactgcagtgagaggctatgatcacaccactgcatgtcagcttgggtgacagagggagaccctgtatcaaaaagaaaaacaaacaaaaaaaaatgcaagcacagtcagctcttcatattcgtggtcttacactggtgttttcaaccaatttggatggaaaatattttttaaaatagcaataaaattaacaatacaaaaatgaaaacatacaaataaagaacaatatagtataacaactatctgagggagttcctagaatcaatcctctgtgaatacgagttaacaactgtaattaataaaaataactaaccaaggccagtgcagtggctcacgcctgtaatcccagcactttgggaggccaacacaggtggatcacgaggtcaagagtttgagaccagcctggccaacatggtgaaaccccatctctactaaaaacacaaaaattagctgggcatgatggcgcgtgcctgtagtcccagctgctcaggaggctgaggcaggagaatcacttgaacccaggaggcagaggttgcagtgagctgagatcataccactgcactccagcctgtccgacagagtgagactccataagaacaaaaaataaacaataataactaaccaggaaaatgaaaaggtcaataattttagttgcctcttattttttttttatttttgatcttgtacatatgatctacgcaaaaagccaatttaaaagaaacataataatcaggttcctttggcaaataattagaaaatggagaaaagcgtaattatgaaaatgcaacaaagcatcagttaacaatttttcattgtttttgtacttgctgtctaaggaaggaaatacttatttgattaaactgctgattcctcttatattaactttcactaagaatgtaatcgtaaatgccaatggaacctttttttgatttttcttaaaccaacttaatgagccaaatttgatcctcacgcttctacagtctgatggtactatataaagcctttactgtgttgttcagataggtttgattttagaagtcagtactcagtaccttatggcagttaggtcacggctttactatattcacaaattaggaacaaccatgtggaaaatgcccaaaatttgctattcgtcaaatatgcatagaaatgctctattgattagattttgtaacaagacggatataccaaatcagttgacactgaagattgaagaccactcagctacatttgtttaaaaagaattgtatgtacgtatttagtttatagtaatcaggaagatagactttttttttccaaacgaaattataaaattattgttccttatgcccatcattttatactttgcatttttaaattttgtatgcattttgagttccagaaaagtattctcattaaatagcactttaaattgatcaccctcataaattcagaatggaggactatgacaattaaccagaagcaatattaatgaaaattgagagctgttagatcatattacagcatttgcagcagtagggaagagcagaacatacaaatttttaaaaaaagaaaacagatggatttcattgatgcctgatatgactatatgaaagtaacaatttcatgatcaaaatcatgatgaatgcattctccataattgagatgtcttattgtatattgagaggctatataatattaaaatactagtcattctttacctcatataagcaattaagtatttgaaaaattgtcaaagatgtaaattgaaaaatgagggtacttcatttgttatcaaaggaaggttcttaaaattaactgaaaacatgtaatttcttactatccatgagtaataaaaatagctttgcaaatgtggcttcccaggtgtttcacttttctaacttcatataataaaatgcaatggaaagagatgtgttaatgaaattatgggaagacccaaagaaataaactaatttgcttttcatgcagactgagaatataaatagagaatgttagaactatcaaataactttggtgttaatctgctctatctattctcttggccaggaaccaagatcacttctgtgactttctaatggacacacagccctaaatgtaaaatcatttttctgatgattagtgataacgagcattttttcatatgtttgctggttgcttttatgttttcttttgagaaatgtctgttcatgtcattttcccatttttaattggattattatttttttcttgttgacttgtttaagttccttatagattccggatattcaacctttatcagaggcatagattgcaaacattttctcccattctgtaggctgtctgttcattctgttgataattggttttgctgtgcaaaagctgtttagtttaattaggtcccactcgtcaatttttgtatttattgcaattgcttttgaggacttagccataaattctttgccaaagccagtgtcgagaagtgtatgtcctaagttttttttatatatacttttttatagtttgaggcgttacatttaaccctttaatccatcttaagttaatctttgtgtatgatgaaagatagtggtccagttgaattcttttgcatatggctcgccatttatcccagcaccacttaccgaataaggagtcaacattttgttaactttgtcaaagttcagatggatataggtgtgcagctttcatcctcagagaaatgtaaatcaaaaccacaatgagataccatctcacaccagtcagaatgaatattatttaaaaagtcaaaaaataacaggtgccgtcaagacttcagagaaaaaggaatgcttatacactgttgatgagaatgtaaatagttcaaccatcgtggaaagtaattttgagattttgcaaagaacttaagcagaactgccatttgagccagcaaacccattactgggtaaataccaaaaggaaaataaattgtaacagacacatgcactcgtacgattatcacagtgctattcacaatagcaaggacatggagtcaaccttggtacccatcaacggtggactggataaataaaatgcagtacctatacaccatggactactacactgcaaaaaacaaacaaacaaacatgaaatcatgtcctttgctgcaacatggatgcaactgtaggccgtaatcctaagcaaattcacacaggaacaggaacagaaaaccaaatactgcatatcctcacattgaatgcccatggacataaagatggcagcaatagacactgaggactactagagaagggaaagagggaggtgggatggtctgaaaaactacctattgggtatcatgctaactatctggatgacagaaccacctttaccccaaacctcagaatcatgcaatatacccagttaacaaacctgtccatatgtcccctgaatccaaaaaaagaaaacgtaaaaagaagtaaagagaaaaaaagggttgtgagtcttaagattagcagtcctctgctaggtgaaaaatctatgtgtgcatttatttgttgctttatatttaaaacagaattggaattgaattacaaatgagtatacttcctggctgtgcttgagtggagttagttttccttggctcaaataaatttgaaggaattagtgggtgccggttaatctgaaccaaacaagctgtgacatgaataggcatttcatggttggtatcatctttatcttctgagaaatatctgagggttgaggaaagacttggaagactcagaaaacatatgaaattgctgcatgccattattcataaaaggtaaatcagtctgtcaaattagtggtatctctgttgcctaagcaaccggtcaggagaattataacttgaaggtagtccaccacgtccatgttagtgggagttaatagaactacttcactatacatccccatgttccttccagctaaagaaaaaatagaaactttccaggaagcgttgactacttaacacatacagaatacaaatccatgaaagaattcatttcattgtaattctctaaggaatgaaaaacctttactgtaataaaaagagtaatactgctcttgcaactaatgtataaataatgataggtaaaacatgcattttgtttaaaatgttatttcccataattacagaggaagaaaaacagggtacagatagtcaaatgacaatgtacttaaaattcagagttaatatctgaaaaagttctatcttttgtaatactagtaattattatgttactttagagacaacatgtcagattatgtttcttgtatctaaattcataagggcagaaacttgatttattgtgtttaattactaagttacataccagttcttatctctaccatcaatggaggtaatgtggcatcaacgctgacctgaatgctattatagagatatttgagtataatcacacttgtaaatgcctgtctggtattgtttagtatatgtaaaaaatattaatatacttaattttaggaatattactttatgatattcagcttaaaattataaaagtgtgcattgagtcacaatttatcctctactttgaaatttagcttctattgtggatgctagtgatttgtttattgcaaacagtgcatttcagtaacagtttcaacatgttccaaatgtgcagcatatacagtttttgcaatgtaattagttagaaattggagatgcttaattttaaaattgaacagttcatgaaaatctatttccattctctgtatggcttatgcagtttctcttcataaaatgttctatagctgcttgaagaaattaagtttagttaatcagaaagaacattatgttttgacacctaatttgaaagccctgttttgaagcagtgatatattgcttatggcattacacagaccaatgagaagccaaataggaaatccacttatgctcaaagtagatctccatattgatgtaagttagggtggtattgtctttttctgagacataattcctaaaagtatatatgtttgctaaaatatgtactttattgtttaacagatttagtagtgaaatagctttacaatgaattgatataattattgcacattagaacacagatcattgatggacatttggacatatgtaacaaacctgtacgttgtgcacatgtaccctagaacttaaagtataataaaaataaaataaaaaagaacgcagatcagtgataaagttattttactgtgaaaccaaatcagtttcattaatataaatggagatgtgaaggatgacatttgaaagcttaaaatgtagcaaaaattctctaaatgatggtagtgaaggtgttttcgtctctatttattctgtattcatctctccttcagtgccgccagcaatctcaatgcctcagaaatcttttaatgccacagcagagagaggagaagaaatgacattttcctgcagggcctcaggctctccagaacccgccatctcctggttcaggtaggttatgcacccccctccctctggcttgtgtccattatcaggcttatggaacagtattggggatcttaatcattttggtaaaaagcaaaccattgcattttagtttcattaaaaaaaaatcctggtgctatctttggggcttacggtggttagattaaactgctaaagagatcaacagtgtgaccccgctctaatattctgagtcaaaggctgtacccattatacttattctgtctgtaaaagcagacttttggaaaaatgggaccaggagcacctgtgacttattcaaacattttattatcattacaatttatcttgaaattgatattctagtgttattgacaccactgtcatatgtatacaatatcatattttattagaatataattgtgtatatttgtattatacacaaaatgttgtattatagaaaaaactgatttatagcattaaaattcaatgaatttaatgtgtaatttttaaaaattacctcatcaaatgaaattctgtattctaaatctataatttgatagtttatttttttagaattttaaaatactatttgatttttattaagttcaagaatatttttaaaatattccattcttttagattgtgtctcaaactacgaaattggagacgatgaactttaaaactggaccatcttgtaaatatgcattagtaatgcaggttgctacagaagcattagctacaagtatttacagaatcacttcataaaccatatagtgaaaaattatttaaaaagattagtaaaatatacatcagaagtgcaaaagtgtccctactaagtattaggttgttgttttaaaagttctttgaaggacaacaattgaaatcccaaactaacttttattcttttttgcttgagcatgtactgatattaccttcaactttcaaccctttgtttctactgcttatcattttaatataggatgtaacaataaatgagatgtttcttcaaatattgtgtgttttgatgttcttttcagacactaattttcttgggacaaactgttggtattttttagtaggattacaccttgaatattaacatatccaccccagataatcatcgtctgtctcagtgactgctgatttactaatgtggatccttaaaagtccatatcagacctaattgtatcacagaaaagctactgaatcattcattccaatgaaaaaatactgttctacaatcttttttcctatggttttgtatttccacagagatttcttttttcttatttgaacagcatttatttaacagataaagaaagtaaagcacaaaaataatatgagcaggaaattgaacaacaaacatgagcttgagatactcatgttccactttgtatgtagtgggaaaaacatcttaaacttcaagcttatgccgatcttagctaatgtaattgatgattccacaaaccaatagtgggaatagtagctggtaggaaagtacaggtgaataagccttgttttgaaataattttccagtcattcattaaggaatgctataaaatgtaaactgttctgtgtaaaggggctagaagtcttcctgcattcaagaggaagaaaggaacatgtttctttatcctgtgaattcgtcctgacgtgcacttcatcatttctgaggcagaaatacatggaaactgggtgtgtgattgttacagtgttagaacatatgtccttgaaaaatatgacaccaggtttaagaagaaaatctcctttacttctgagattacttgatcacaatgattccaagtttgatagtaatttcagattccccacctatttatgttgatgttaagttatgcagattcctcattagtcccatctttaggataatattagaacacttaccatcaagtcagaatagtaattgtgagactagatgcttttagtttggtcagtttagttgtctgcagcacaaccctttcaaataacagcttaccaattacttctcaccagaataccaagatcctccagcagctgggaagtgttagctggcttggtttttcagagagacttcttttctgcagagatttttttttcttaaagttttacattccttcaaaactgttttcttatatttaattagaaatagtattatatagactagtataaatcagattcaaagaataatataatgagtaatttaaatttatattttttcttctccatatcttcatatggtattagtttcatcctttggatagaatgaaataacaatttattgaaaacctaaataattgttctagtctctggatataaaatatatactgggaggatgagaatgtgtggttgtaacgttaacgaaggtaaaatttgtgttagagggaaattctgaccttgtatctgacatatagacatgtcatgtttgtggaaaagaaaaaattcctgaaagtatcaggaaatgtagggtagcatcccgagagaaatgtccagactgtttcatagagataatatttccaagcgagataagtgaagtcagttgtactagtcagcttgggctgccaaaaccaaataccacccactgggtagttcacacaataggaattccttgatctcttgacttcgtgaaccgcctgcctttgcctcccaaagtgctgggattacaggcgcaagcaaccaccaacatggtgaaatcccatgcatggtggtacgcgcctgtagtcccagctactctggaggctgaagcaggagaatagcttgaacccgggagacggaggttgcagtgagctgagttcgcgccactacactccagccaggcaacagagcaagactctgtctcaaaaaaaaaaaaaaaaaaaaaaaatttcttttcccatatttctggacactagatgtttaagatcaagataccagcagggtggccttccctctgtgtacaaactcatggagagagagagttctggttatcttcctcctctttcagaaacagcaatccttttttgtttgtttttaataatttcaacttttatcttagattcgcaggtttgttacatgagtataatttatagaaaccgaaagtagataattggttgcctgggactggatatgagaatagagattaactgtgaatgggtataagagatctcttgtgatggttgaaccactcaatacagttactaaaacttcagccaaccaaacaaaaaccaccagttttatgggattaaggcctcactcttatactctcatttaaacttaatgtcctccatggaggccttattttcaaatacagtcattctgggggttaggacaccaacatgtgaatttgagggttgggaaaacccaatttagttcataacatcaataagataattaaagaccataataggggaattataaaacatgttcacaaagagaatcaaaagcacttagtgacatgtaaatccaagagggagtaaaagcagtgactctaaaggttccccccttcattttcgttcaaacggtacttctatattgagaatacaatatggatttttattgttagcccattaatttcataaatttaatttattttaaaatgttccatttaaaccccacttaatcatgatacacaggcatgcccagcataatgacctatcaatgacacgcctcatatgtgatggtggttccataagattataatggagctgaaaatgtcctattgtctattgacatcgcagccatcataaaatcatagctcaacatattactcatgagttggtagttacactagtgtaaacaaaccaatatataaaagcatatacatattttatacactacataatacttgataaatatgttactggtttatatatttactataccgtacttttaatcattattttagagtgtactccttctacttataaaagagagaagttaactgtaaaacagcctcaggcagtttctttagataatattccagaagaaaggattgttatcctaggagatgccagctccatgcctgttattgcccccaaaagaccttgtagtgggatgagatgtggaggtggaagacattgatattgatgatcctgaccctgagtcggccgaggctaatgggggtatcttcctttaaaaaaaaaaaaaattagtgataaaaacttaaacaagaaaaaatatatatccttataaaataaacaataaagaaaatattttgtacagctatacaatgtgtttgtactttgagctgttattaaaaaagagtcaaaagtttaaaatttttaagagtatataaagtaaaaaaagctaaggtgaatttattattgaagaaagaaaatgtttagtgtcgcttaagtatacagtgtttataaagtctagagtactatacagtaatgtcccaggccttcacagtcactcaccacttactcactgagtcacccagaagaacttctagtcctggaagctccatttacaacatatatatatgccctatatatgtatagcattaattttttttttttttttttgagatggagtctcactctgtcacccaggctggagtgcagtggtgcaatctcggctcactgcaacttctgcctcctgggttcaactgattctcctgcctcagcctcctgagtagctgggactacaggcatgtgccaccatgcccggctaatttttgtatttttagtagagacgggtttcaccatgttggtgaggctggtctcacactccatgtgattatcccgcgtccgcctcccaaagtgctaagattacaggtgtgagccaccacgcctagcaaaaaacacttttataccatattttttactgtaccttttctatgttttgatatgtttagatatgcagatatttactattatgttacagtcgcttccaacattcagtatagtaacataccgtacaagtttgcagcctaggagaaataggccataccatatagtttaggtgtgtaataggctatataccatcttggtttgtgttaagtacactctatgatgtaaacagagctacaaaattgactggggacatattttgtagaacatacccctgtggttaggcaatgcatgactgcattatcctttttatgcatggctggaatcaatgtgtcaataatttgttaagaattttttatattcatggttatgagaaatattgttccatcattttcttgttcttgactttttaggggtcagggcattactagtgtcagagaatgagtagtgaagtatttcttcctcttctgttttccaatataacttttatgtaatgtttattatttcttaaatttctggaaaaattgccagtgaaaccatccatgtcataatttttcttaagttcacatttaagtacaaattcaataatatttttcatagaaatagggctattcaggtaattttctttagtgagcttagatgattaacgcaattccaggaatttgtccatttcttttaaatggtatttactggcattgtcattcatagtatccctttgttatacttcaatttgcatgttttctgtagtattctcccctctctcatcttgataacctcataactggttatttgttctactgtcttttttatcctgattattctagatgtaggtctatgcacatactaatgtcagtgaatctgcttttggcttcacttatttcttttttgtttcctattctccatttcattaatttctggttttatttttattattattttcctcctgtttactttgtctttaattttcttttccatttttgattgcttaaggtggactcatgtcattgattctaatcatttattctaatacaagcatctgtttttcctctctaaatatggctgtaattgcaccctgctaattttgatatgtcatatttccaatttggaggggtttaaattttgtttttaattctcatgttatttttaatactattcatttagaagtatgctgatttgtttctaagtatttgggtatatttcataaatattactgctgttgatttttaactaaattctatacttatcaggaaatagactttttaatggtttcaatttatttaactttattgagtcttaaattaaagtatgtgtattccactattattgtatggagaaatccctaatattaaatagatcaactcccttgatagtattgtggaagtcttctatatttttttgtaacgattcttctccaactttatttttaaatgtgtctatttttatattcagttctctctgttttgcttcatattttttgaagctctagtattatatgtttaaacatttattcacgtagatcagtactatgaaaattattatttaagggctttaaggatggaaaaaaatgataccatatagaactttgtttcagtctttttctgtttttcattttaccatgtcttcaagtgaactaagttacgtcactatgtcttcaagtttactaatattttctactgtaatatctaatgtttttaatcccatcagagtatttctcataattttatttttcttctctgagagtttcaaggagatgttttgtatgtcctccatgcctctcttaccattctcatgttttacttccttgaaaatattggaatatatttctaatagttgttttaataggcatctactcacctaccctctgtatcatacctatattttgtaactgactgatttttctccctcttgttttatttattttttggagacagattctcgctctgccacctgggcaggagtgcagtggcactcactgcaacctccaactctcgggctcaagtgatcttcctgattcagcatccccagtagctgggactatagacatgcgccacaatgcccaattaactttttaattactatttagagaagtggtttcagtgtgttgccagggttgaacttcaaatcctggcttcaagaaatcctcctgccttggcctcccaaagtgctggggatacaggagtgagccactgtgcctggtgatttttctccttcctctgggttgtattttcatgtttatttactatcctggttagtatatatactctatactctctctctctatatatatatatatatactctatatacatatatatatatactctatatacatatatatatagagagagagagagagagagagagtgagagagagaatctcactccgtcgcccaggctggagagtgcagtggtgcgatcttggcccactgcaacctctacctccctggttcaggcaattctcctgcctcagccttcgagtacctgggaacacaggcacgtgccaccacatggttagtttttgtatttttagtagagatggggttttggtatgttggccaggctggtcttgaactcctgacctctggtgatccatctgccttggcatcccaaagtgctgggattgcaggtgtgagccaccacacctggccgtatcctgggaatttttatttatttatttattttgagacaaagtctagccctgtcgtccaggctggagtgctgtggtgtgatcttggctcactgcaacctccacctcccagattcaagtgattctcttgcttcaacctcccaagtagctgcgactacaggcgcccaccaccacgcccagctaattattttgtactttttgtagaaaccgggtttcaccatattggccaggctgatctgtaactcctgaccttgtgatctgccctgcccgcctcggcctcccaaagtgataggattacaggtgtgagccaccatgcccagccaggaatttttaattgggttccagacattcagaattttgtgttttggggtgctgaatatttttgtattattttactttgttttatagatgcagttaagtgacttggaaaaagttttatttgagggagagcttccatttaggctcttttaggtggatccaaaccaccttcagtctagggttaatctggttccattactgatgcaatattattctaaggacatgacttaagtcctgtgttttaggatatctttttactctggatggttgaattgcagattattcctggtgctgtgtgagcttctggaattattgtactttatattttctaatggttctttccctcatctgagaaggccttactggtgtacactcattgatcaatactcagttaaagatttgttgggaaccctctgcagatatctatagctctgttgtctgtgcagctgtcttctctcacattatctaacctgcaccttctgtcgctttgacctcccccaactgcacactctgtcttccaacccagatacattgcctgactctgttcgtgttctctgcctcccccagctgcagcctgaaaactctcttcaggcagtcagcgatggaggtactcatatgccactgtcatatgcaaccagttggctaatgtgtgaaaactattgttttatatgtatagccagtgtttttgttgtttaaattgggagcatatagtttatgttaatacaatattgttcaaaatgaaattatcattcaattctttagtgtttacattaattctgtaatcctgacccctacattcttgtacctgaaaaaggggacgcttagagaagtggtttgagtttcaaagaatgggcttaatgcatgtgtcagaatgccttggagtgattttttagacgttgacatttcatagacatggattgtgaatagcaataggagcatttctacctgactttattgggagggagtaataaggtatttattgggagggagtaataaagcattggtaatattcccttatttatgatggcttaattatatttcctattgagcatttaaagtgaatgtaatctgtacacacttatgttctctaaatatgttcaagttttgcccctctacttcaaaggccaaatcaaggatttttattttctcatgaaaattcccagagtagtacagccatcttccttgtcatatctcccgttataacagatcacctcctgctcaaaaaagttgtaagtccactaatggaatctgcattaacctctattaatgccaaccaaattatgggttcctcatgatgggtggcaactaatttgctatacatcaaacatttagcacaatgttttatatgaagtaaggagataaccctcttttttagaaagaacattggaacttaattaacctgctgcttttattaatgggtgagcctgtctttttatttgtgaattgaggagtagagatatacacatactgtagttctctgattttgaatgagtaagcagagggaaaatgcacatttatgggctaattgtgagtgctgaaacctctaccgtgctattattattattattaggaaacaaatgaataattttcattgaagatattgagaaatatattgtatccctaattatgatgaaaaccctatctacatattaaattctagataaaaactctgaaatgtcatttttatacctgttgtaaagattgcattagtaataatatcaaaaatatatataaaagatactatatatgcatttattattattttttttttcggacacagtctcactctgtggccgaggctggagtgtagtggtgtgatctcagctccctgcaacctgcctcagcatcccttcggagtagctgggattacaggcgcctgctaccacgccaggctagtctttgtatttttagtagagatggagtttcactatgttggccaggctggtctcaaactcctaacctcaagtgatccaccggcctctgcctcccaaggtgctgggattacaggcatgacccaccacacccgacccatttgttattattttatgaatcctaattttgcaatcttccactcctcttaagaaatgttgtgtacttcatggtacatttagagatgtcatgagaaactggaacaataaattctattgagtatagacatataaagattatgttcatatatgtgttagtggtttctggaaagtagaaccagaattcactggaaggaactgcttagtgtatcagagaaatgtttgattttattttagaaaatagttttaataatatttatagagatttttttaaatttacaattgtatggacaagcaaatgtctccataccaatggacaaattccagaactttccattagtggttttaaaatcaattcagtcatgcaaaatactattataagaaaaatacaggaggggatgcaaagaagagaaaagaggaaaaaagatgaataaaatgaaaggagaatacacaatataaaacgatttcacaaataccgagggaaatcatagaaatagttcagattttaatatattgaaaatatttcttactgtagattatagtaaaaaatgtttgaaagccgtggttggttttaaaggacaacttagactagaatggagcagagtgagatgtatttcagtagagaaaaaaaaccttaaaaatattgataattatttgggactaagaggaaacagaaaaacaatttattttcctcattaaagaataaaattatcacattcaaaatagtttctaaattaattgtgttttcatgtaattctctcatcttactattttattggcagtacttatatgcaatatacatttatgatatatttacattgtatttactttgaagcttctgtgaagaaattttctacataaattattttaaatgtgtcccaagaggggagtaaataaatatatataataaatatgtattgtctcaccaacatttaattgtgtatgggattaaaaacagcaaacaaaatgttttttttgccaataatcaaagtacaaattgaactgatatactttttgcctggtaactattaagattttgacatagttcaaatgttattcttgtgtttacattcaaaaaaaatttcaagtataattttattgtttattcgttaagttctgaggctactaaaaatatacttttgattggaatatagccctgtctttcaatgatgatagccatatagtcatcaatgcctatagattaaaaagttgattaaaatctactaaattataaagccagatctgtgaggatgaacctcttttttcttctttaggaatggcaagctcattgaagaaaatgagaagtacatattgaaagggagcaatacagaactcactgtcaggaacataatcaatagtgatggtggtccttatgtctgcagggccacaaataaggcaggagaagatgaaaagcaagctttcctccaagtctttggtaagtattatagcatagtggctaaaactgttatgtctattggaagatcagagtgaaattctactctaatcatttgaactatttaaactttccatattaaatctgtttcctcttctctgtaatatgttttttaaatttcagctaccagatagaattttttgaagaataacgtaaaattacatatgcaaatttttgtaagtcattgatatgcttacagaagctggaaaaaaataatttaaattacacctagtggggtttgtcatctgtgtctgtaagggtggatctctgtaagtctctaaatgacacatgttaggatcagttttacttacaatatagttcaaaagggcacatttttaaggctacaatttaaaaacattgacatgtaactatacttaaatatttgctttcatttaactaaatgaaaatataagataaatatcttccatatttaccaagagccatattatcttatttgggtaacttatagagcatataaaactagtactttacagaaatataatgacgtagcttcaattatgtttacaagaagaaagacagtgatggcagtgggtgcttctaatagaatttttccctttaattagtgtaacactaaaaaatatatgccctattaacatttaatatgttttctccaactttaaaaacactgttattgaaatgctttcacaacaaaaagagggaaaaggaaggaaggagaaatctgttagaataagaaggactggggcctgttgtggggtggggggagtggggagggatagcatttggagatatacctaatgttaaatgatgagtaactgggtgcagcacaccaacatggcacatgtatacatatgtaactaacctgcacgttgtgcacatgtaccctaaaaaagtataataaaaaaaaaaagaaggaccagtgtttgcagttgacaggtgcagagtgccccttacactgaccatgagatgaatggtaatccctgcgtggacacgccctctgcagactggccctgtagtcactgctggaagcattttctgagctagagagatatttataaagcttattttcaagtggagtgacaaggagaataaacagctataccaaaatgtattaaaataaaaaatacaattttaaaagtagagatgttttgagaaagaaattggataaatcaggaagcattgaataaagagaagtattgttttggatagcatagtgtttggaaagttattcagcaggataatgtttaggtgatgttcagaatgatgatcttctaatgatcagaagtaggccaagctaagagcctggagaagattgttcacttacagggaaaagtaaatatacttaacatttttagaaattatagaaagtccctaacttgttctagcagtgttccccacttgaaaatattttttctataaaacctacaaaattaaataagtatgattcagtataaaaataatcatattagaaatagtattgtgtgagattattccaaaggatagatggtcttaatctgcctcagtgtactcatctgaaatagtatttacatcgtttttatcaggattgcagtgaaaaagaaaaaagattttttacatttctgatattttcatcctttcaagtagaacataatacatgaaaattttacatgttatgttattgttataatcccttttgtgtagtaacattcaacaaacttttgttgctcctgacacaaaattgtatgcatattgtgggaatataactaaatctattaaagttaatgaaataaagagtgaattgttaaaaattctgtatgctgtttttctgataccaagaatgttattttctgagcttaagaacaacttatttgtgtttctttgttaaatgtattaaaatatataaaaagtaactcacactgaaataatgagtacttgattgtatccattttatatctaaacaagcaaacatttaggaaatacaaataacacagatttcaaaaaataaagctctctggaactatgtaagtttatggagggacatattttaatattaagataattaaaattagtagacataatgcttttctttttatacaattgatgattaaaaattagttacgttgtctagtatattgttaagtaaactgaagtcaaaataaatcaagtggaataatatatataagtaaagtaaatatatttacttagtaaatgtttcaaaattttatatgattctacttgctacattttcaggatatatcatttacttctttggtgaaattgttaaagcttaagagagaattaaaccaattgtgtgtgcatgtgtctgtataaatatattcatgtgtgtgtatgtgtatatatacatatatgtgcacacatatgcacccatatgcatgtgcctttaaaggaagaaattttgattttgtggctttaagataggaaaataaatcatgagatgacttttaaattggcagaattttgaaacaaattataatttggatgttggtttctaagtcacctcaagttattttgtataatggtaacagatgagttttatttcctaaattttttttcctgtgctattcaactgtcctggtacgtctgtaaggcaaagcaggccactgtaattctacaaagctaataatatcatactatactatagtagacttaaacacccatcatgacttttgtctgagaagtaatattttcctccaataccggttgagtaatatatatattctttacagtacagcctcacataatacagcttaaaaatgaaactacatatgagaatggtcaagtcacactcgtatgtgatgcggaaggggagcctattccagaaatcacttggaaaagagctgtggatggcttcacgttcactgaaggcgataaggtaaccacatctcaatatgtaatggtttccattaccatgcaatttcagtattttcaatatcattaaatcacaaattagtctccaatttacctagtaacttgtaggatcaaataaatggtttgatttttaaaaaggtaactaacacaatgtcggctttaccactttcgtgggaggggaaatgtcaatatgaaatatttaaagatgttctttattaagtcacaaacgtttaggctattggtattactagcattgcttaactagacttttgttatacgttgaatctataaagtatgttattgcagttttaacccctgctgtgtgagtatctggcctttgcaaattcactgaccatgagaaaagtgctaggacaaataatattgccattttaaaaacaggaataaagatttacaaaccagtacatttaactttaaacctcagcaatttcagtttcttaaagaaatgattgtatatttagaaaacactgtggtgagtgatgagcgttgggattggcgaagaagatttacttcaaattaatttaatgtattttctacttagacaggtgtcaacaaactacagtccatagggcaaatttggcttccagcctgttttggtaaataaagctttattgaaactaaagcaaaagagtaatttaaattcaaaaaagtctgactgtcatccaatgctttaccctttagaaattgtctttctgcagtagaagtgtaggttctgctttcatataatttagaatctaatgtagagaaataggtacaaacaaattactgcattgtgatgacctttaaccagaatgcattcaacttacttagaaattaatgaaacattactatatgtttcactatactaatggattttaattactattatatttcacaacttttcatatgaacttcaaatacaaacaaaagagaaaggaaaagatggtgaaatattgaaatgatagaactggcaatttcacataagtgaagattataacattaggctattacattgcttttctctactcagtgttaaagagaaacctcctttaaacttttttcattattaactttatttaggtaaagagtccaatttctaaagtattcatacacctcaatataactttgatttattaacattgatagtaaaaaagagaagaataaatgtttgtccatagtacactttacatcaatcagtccatcccatcatgttatatttaacaacatgctaaacccataaattcaccaaaaaagtaacttctctggtcaatttattactttccttttgaaagactgtgttatcatatatgttacccttttttgtttcattttctcctcataatggcattttaagagattatttgataattgtactattttgatatacttattttatatattcaagttgaaaatcaaatttataaaatgtgaatgacagtcataatcttctgcaacccagataaaagttatagtttgctttagtatattcttaacaaaaaataatgtatgttactatgacacagttgccaaatctgaaaagaattaaatttatgtgaaattaaaaaaatacaatcgtatctgaaaccatagaggattgtttttgtttcaattttgcatgtttatttagattagatcactcaaaagtatttactttcatgcccttagactttatcataccttcatatttctaatgctgttttctaattatttttcagcttactgcaaaattcttaaaagttatcttctcaaagatagtttttactctgcatttaatgaatgttaccttatatattatgcagagaatgaaagataaattatactcagttatttcattaataaatgtcatcaagtaacaagaaagctgttatattttattcttggatctatgcctcaggccaccccaaactacacacagatacttattctgtagtaactgtgaaaaataatcttaaagcttttgtttcctaaggagtatattaaaaaacacatcttgttttaagaaaatctgacttggtttctttgcaataaacaattatagaaactcaaatatgcttttctgcacaagtttaatccagtcaataaagaaattaagtctattgtatttctattatatttctccaaatatattttaagatccttgacttatttttctatactccagtacacttcttttcccctaatatttctagtttcctgaatagcataattcacaaatcaaatggttgagctgaactttgaagtaaagtttatctagttttgaatctcagctctgccatttatgatgcctcagcatgataaaattgagttcaaagagtccaaataacattaccagtgttatttgaactctttttaatatgagtttttaatatgaattttttcatctttaaaatgttgatatttaccctcttgttataaggaagatgagcacattacaaatgcatatcaatgtttatcatattataaatatccaataaactttactttttaccttgccatattacaaatttacagtacaaatttacacattttactttgtcatattacaaatttacagtatggcctcacataatacagcttagaaatgaaattacatatgagaatggtcaagtcacgcttgaagcatagtttatcttgttgcctctgtaaagtataactaaggtttgattgaactttaatgagatcatattattcctatcatggaaagtagcatgggattgtactttccataagaatcacgtgggaagactatgaaaatgcagattctagattcccacttcttgaagttgatttagtatatgcagcccagggcataggaatgcatattaaataaactcatcagttggtgtcatattgttagtcttcaagccatattttgggaaacaacttcaagtaaggatgaaaattaacagctaatatttccaacagaaaaatgatcttaaccaattagttgacacctgatgggggcttgggaactataaaacaaaactaaactaaaatttccattatgcatgtatcagtcaagttttgatgaaactaaaatatatagatcaaaaatagtgaaatatcataaatgtcgtgtagtaaaaactaataatttcatctaacaacatggcaatgtatttagcaaatatgttcatcattttagatttttcagagaggagggtctcaattaacaatattcttttttttttttttgtctaagttctcaatcaccagataagacaaaaaaaatggggataaaataccatgtgacttaaatgtatagatgagtgaatgctcttatactgagctcaataattagataaacatactcaacacagtcccaagtagcatgagacttacagccctcccctgtgtgagaagacatgctaagataaccttgactgagggggacaatggtgaacccatgttctctttggggtggtcctttctgaaaagaaaaaaaggagtggttaggaagtgtatttaattttttgtgcccccatagttacctatcagatatctcttcacttcccatgggagaaaaagtaagggacttgaaaagtccaactgtggtatgttggaagaccttcctccccatggaataaatgattaagagttcacgagtagcattcactgcccaactaacaatatgctaataacatttaaatcaccatatacataactatctcagtttatcgtctggtattattactgcatagtaaatgaccccataatataatggcacaaaccaataattttctctcacttttgattttgtggatcagaagtttgagtaaggcttggccagatggatatcacttggaatctctaatgtgcttgtatcagatgttgctactaatgttgcttgtagttgtagttatgaggaggttcaactttgctgagaagccaacatggctcacttaagtggctggaattcagtcttgactgtgggctgcaagctcaggtggagctgtttttggaacatctatatgaagcctctccagtatggctatctaagagcagcctgctgtcttttgtggcagcaggctttctccacagagaacatttcagaagaatcaggccagacagacactatctggtctactctgacatagtcttggaagtcacacatttctcacttctgccacagtatattggttacaaacaaattataaggtcgcccaaatccaacatgagaggaattaggcactctgtcttgatggggaaggattcacaatcatattgtagataagtatgtggggtgggagatattgttaaggccatctttggaaatgcatctacaatttatctcaaaatattcccatgacttaagtccaatcattttcccaggcttgtagatgaggaaactgaggctcaggaaaattcaggggtttgcacaaggtcacacagggagtaagtggcagtggcaggatttgaactgtggtctctcactctgcatagtgcatgcccgtgcaagggcttcaggattctgttaaagtgtatggctggcactctcataggaatttaaattatatttccatttaatcaaataattgaaaagtcagaagaagctttgtttttaaaacttgtttataatctgatattacttattttaaactaattaaaatatagtgttcagtaaacaccaaaactatttactggtttttgttaaaatacatatatgtaaaaaattacttcgtataatgggtactaccaaaatgtttgaaaacccatgccatataaaacaatctagaggtgtgggaggggagcaaaatggcagaatagaaggctccaccaattgtctccccaaccctgcaaggacaccaagttaacaactatctatacacatacacacacacacacacacacacacacacacacacacaatcttcatgagaaccgaaaatcaggtgaacagttgtagtacttggttttaacttcatattgctgaaagagtcactgaagtgatagaaaaaaatagtcctgaataaacaacaccaacaaacctccaccaccctcagcagccttgacatggtgtcgagagcttctctgggagctggaggagagagaacatagcaattttgaggcagtgaactcagtcctgacctgttagagcagaaaggaaaacaagacctaattcaactgacacccacccacagagggacaatttaaaccagccctagccagaaaggaatcaccgattccagcggtacaaacttgagtgcctgcaaacctcaccagtgaggaccaaagtgctctgtgtctcccagtaaacttgaaaaaacttatgaaactctaggccataaggactgcaactcttaggagagtcctagcgctgaactgggccaagagacagtggactggtgtcaggtggggaggaatgtgacatacagatacaccagctggggtggccaaaggagtgctgtcatcttccctcccctaaccccagcctgcacagcttgtggctccaaaagagacctctttattctgattgacgagaggaaaggaaagagtaaggaggacttggatactagctcagccacagcaagatagggcaactgttagagttgtgaggactttgttccatgtcttatctcccaaacggtgtttctataatagacaaactctgggccagatgagaacacactggctttcatgaaaggacccagtcctggcagcattcatcaatggctaactaaagagcccttgggccctgaataatccacagtgatacccaggtactacgtcaagggctttgataagcctctgatactttgctgggtccaaataatagcacagccatgggggtaaagcatgaagtggggtcgtagggtctgccaatccaggaccttactcttgcatgccatttctggacctgctgtgggtcactgtcctgaaatgtgattgcaggccaggcagcattcaccacaagctaacttaagagcacctcagcctcaggggaacattgttgtagtctagcagtactccttgtggtctggggtggtggtggctacagggtgaggctcctctgcctttggaaatgggagggaagagggggaagaactgaatcttgtggtctgagtgccagatcagccacagtaccatagaacaccaggtagacttctaaggttttagacctctagtctctgactcctagacagcacctctggacccacctggggcaagggggaccttgcttccctgaagggaaggatgcaggcctgactggctttgcctcctgctgattgtagagccctaaagccttgagcgagcataggcagtagccagggagaggttacaacaggccttaggtgagactctgtgctgtggtggcttgaggtctaaaacagcacagccatactgctgatggccacaggagtgcttgtgtcactcttctcccagctttatgcggtcagaaaatagagtgagactgtgtttgggagaaagtaagggaagagaacaagagtctctgcctggtaatacagataattttccccgaacttgtccaagactatcaaggcattacctctatgagtctgcaagaacctcaacattactgggctttgggtccctctaaagcaaatacaacttagatcacaatacccaaggtttttcaaatatctggaaagccttcctaagtaggatggatacaaataagcccaaacagtgaagaatgcaattaatacctaactctttaatacccagacactgaagaacatctactagcattaacaccatccgggaaagcatgacctcaccaaatgaactaaataagaccccagagaccaatcctagagaaatagaaatatgtgaactttcagacagagaattcaaaatagttgtgttgaggaaactaaaaaaaatcaagatgacacagagttggaattcataattctatcagatcaatctaacagagattgaaataattacaacgaatcaagtagaaattctggagctgaaaaatgcagcaggcatattgaagaatgcattagagtcctttaatagcagaattgttcaagcagaagaaatagtcagcttgaagacaagctacttgaaaatacacagaggagaaaaaaagaataaaaaaaatgaagcatgcctacaggatctagaaaatagcctcaaaatgaaaatcaagagttattgtccttaaaaaggagatagagaaagagataggtgtagaaagtttatgcaaagggataataggaacttcctaaacctagagaaaaatatcaatatctaaccgcaggaaagttatagaacacaaaagatttccctaaagaaggtactacatcaagggctttggtaagcctctgagacttgctgcgtccaaataatagcacaggcatttaatacctcaaggcatttaatactgaaactcccaatggtcaaggataaaaaagcaaaaaactaaatcatatcaccagagaaaatcaccctcactgaaggaagacaggaaggatagaaagaaggaagagaagaccacagaacaaccagaaaacaacaaaatggtagtagtaagtcctaacttatgaataataacattgaatataaatggactaaactctccaatcaaaagacatagactggctgaatggataacaaaaataagacccattgatctgttgcctacaagaaacatacttcatctataaagactcacatagactgaaaacaatattccatgccaactgaaaccaaaaaaaaaaaaaaaacaggagtcactatacttatgtcaaacaaaatagatttcaaaacaaaaactataagaaaagacaaagaaggttaatatataatgacaaatgtgtaaattcagcaggaggatataataatttaaatatatatgcacccaacatgggagaacccagatacataatggaaatattattagagctgaagagagaggtcccatcacaataatagctggagacttcaacacccaactttcagcattggacaaatgtttcagacagaaaatcaacaaagaaacttcagatgtaatctgcactatagatctaatggatctggtagatgtttatagaacatttcatccaatggctgcagaatacacattcttttcctcagcacatggatcattttcaaggatatattatatactatgttacaaagcaaatgttaaaatatttaaaaaattaatatcaagcatcctctctgaccacaatgcaacaaaactagaaattaataatgaggactttttgaaagtataaaaatacatggaaattaaagaatatgctcctgaatgaccagtgtgtcaatgaagaaattcagaaggaaatttaaaaacttcttgaaacaaatgataatggaagcacaaaatacaaaaacctatgggatatagcaaaagcagtagtaagagggaagtttatagctataggagcctccatcaaaaaaagaggaaaaacttcaaatatgcaatctaatgataaatcataaagaatggaaaagcaagagcaaaccaaacacaaaattagtagaagaaaataaataatggagaacagagcagaaataaatgaaattgaattaaaaaatacaaaaggccaatgaaacaataagttgctttattaaaaagttaaacaaaatttacaaagctttagacagactaagaaacaaagaagatacaagtaaatacagttataaatgaaaaaagagacattacaaccaatactgatgagcaactatatgccaataaattggaaaatctagaagaaatagacgaattcctatatacatacaacctacacataaacaaaatttaatgacatttttcacagaaatagaaaaaactttctaaaatttatatagaaccccaaaagactcagaatagccaaagctgtcctaagcaaaaagaacaaaactggacaaatcacattacctgacttcaaattatactacagagctatagtaaccaaaacagcatggtacaggaagaaatccaaaacctgaacagaccaacaacaagtaatgaggtgaaagccataataaaaatcctccataaagaaaagcttggaacctgatggcttcactgctgtattctaccaaacatttaaagaagagctaatcccagtcctactcaaactaattcaaaaaatagaggagaaaagaatatttccaagctcattctacaaggccagtattactttgatacctaaaacaaagacacataaaaaaagtatctgatgaatattgatgcaaaaatcctcagcaaaatactagcagccaaattcaacaacacattagacaaatcattcatcatgacaaagtgggatttttccttgggtcaacatataaaatcaatgtgatacatcatatcaacaaagtgaagcataaaaaccatatgatcatttcatttgatgctgaaagagcatttgataaaatttaacatccattcatgataaaaacactcaaaaaactgggaatagaaggaatatatgtcaaaataatagaagccatatacgacagacctacagctagtgtcatactgaatgtggaaaaattgaaagtgtttcctctaagatctggaacactacaaggatgcctactgtcaccactgttattcaacttaataatcaaagtaccaactagaacaattagacaagagaaagatctaagtgacatccaaattggaaaggaagaagtcaaattatccttgtttttagatgacatggtcatatatttggaaaaacctagagacttcacaagaaaactgtcagaactgataaattcagtaaagttgcaagatacaaaatcaacatacaaaaatcagtagcatttttatatgtcagcagtgaagaatgtgaaaaataaaaaatatcccatttgcaatagctgcacatgaaattaaatacctaggaattaaccaaagaagtgaaatgtatctataatgaaaactttgtaaacactgatgaaaaaaatttaagaggacatcaagaaatggaaaaatattgtatgttcatggattggaagaatcaatatttttaaaatgtccatattacccaaagcaatctacagattcagtgcaatccctatcaaaatttaatgacatttttcacagaaatagaaaaaactttctaaaatttatatggaacacaaaagactcataatagccaaagcaaaaagaataaaactggacaaatcacattacctgacttcaaatgatactatagagctatattaaccaaaacatcatgatactggtgtacacacagatacatagacccatggaacagaatagagaacccaaaaacaaatccacacaactacagtgaacccattttcaacaaaagtgccaagaatatacaatagggaaaagacagtctgttcaataaatggcgctggggaaactggatatccatatgcagaagaacaaaacttgacccctgtctctcaccaaacacaaaaatccaatcaaaatggattaaagacttaaatctaagacctcaacttatgaatctactacaagaaatcattggggaaaatctccaggacattgacctgggcataattttttgagcaataccccacaagcacaggcaaccaaagcaaacgtagacaagtgggatcacatcaaattaaaagccttctgcacatcaaaggttacaatcaacaaagtgatgagataaccaacagaatgggagaaaatatttgtaaactacctgacaagggattaaccagaatatatatggagctcaaataattctatagaaaaaatataattatctaatcaaaaaatgggcaaaagatttgaatacacatttaccaaaagaagatacacaaatggcaaacagatatatgaaaaggtgctcaatgtcatggatcatcagataaatgcaaatgaaaactacaatgagatatcttctcactctgattaaaatggcttatatccagaaactatgcaataagaaatgctgacaaggacgtatagaaaagggaacctttgtacactctgagtggggaggtaaaatagtaaaatagcaatggagaacagtttggaggttcatctaaaaagctaaaagtctagctactctatgattcaacaatcccactcctgggcatatacccaaaagaaaggaaatcagtacaacaaagagatctctgcactcctatgtttgttgcagcactgttacaataactaagatttggaagcaacctaagtgtccatcaacagatgaaatggataaagaaaatatacacagttgggtactattcagccctaaaaagaatgagatccagtcatttgcaacagcatggatggaagtggagatcattgtgttaagtgaaataagccagcatagaaagataaacatcacatgttctcacttatttgtgggatctaaaaatcaaaacaattgaactcaaggacatagataatagaagaatggtaaccagatgatgggaagtatagtgaggtggggcgtggtaaggatggttaattggtaaaagaaatagaaagaatgaataagacctactatttgatagtccaacagggtgagtatagttaataccaacttaattgtacattttaaaataacttaaaaagtgtaattggattgtgactcaaaggataaatgcttgagggaatgaataccccattttcttgaagtgcttttttcacattgcatgcctgtatcaaaacatctcatgtaccccacaaatacatacacctactatgtaccccaaaacttaaaaatttaaaaattaaaaattaaaaaaaatctagaaacttaacactattctcactgtaaaataaatgattaagatagtaaataaatattttcagagttcatcttcaatgataatgggttaaagttttaataactgtaactcactaactacgatgtgttcctaattgtttttattttattattgggcacaattttatactacaatccaggacagcttcaaatagtgatagaattatattatttcacataaatgctactgggaaaaaaattatgccttttatatgaaatttctcatattctactggtttctgatgctaataacccttccttgctttgaggaagatattgaactgttgaactgtgcatatgaatacagcacaaaatagctttgcataatgtgatatccttcaaaaacaacagaattcacactggttaaaaacagagctattttaaactaatgactattgttatctgtcatccaaagcattttatgtacatgtaaaataatatatgcaatttttaaaactgttcagatcaatttcagatatacatataagcgtatctattttccttagaaatgttttctaatatctaggtcgggtgcggtggctcacgcctgtaatcctagcactttgggaggccgaggcaggtggatcacgaggtcaggagatggagaccatcatggctaacagggtgaaaccccgtctctagtaaaaatacaaaaaaaaaaaaaaaaaggagagaaaagaaaaaaaattagccaggcgtggtggcgggtgcctgtagtcccagctactccggaggctgaagcagaatggcgtgaacgcgggaggcggaggttgcagtgagctgagatcctgccactgcactccagcctgggagacagagagagcgagactctgtctcaaaaaaaaaaaaaaaaaaaaaaaaagaaacttttctaatatccaatataatttcaagataatttttctctattttattgagttagttgtcactaacttttaattattagtttattttaaatttctaggcaatttattttagtgataactcaaatattattggcgatatttccattaaaatataattgatgtacagtagtagggctatccaaaaataaatcaacagcttaaacttttcatagaaatttggcattttcttaagatgcacttgtgtttacaaattggaaaccctgacctctttatttaattaatgttgtgtacttaattgtaatatttaaatgtatataataaagcttaagacaaaccaaagctctttccacagaatatgaaatagccataagtcaaaattttgaattatcttgtacatactaagcaatatattgtttttattaaaaacttttctttattaaattaaaccatgctttttttcaaagccttgatctgagatatatgtgagattgtatgttcaaagtgttttaacataattttgtcacataacaaacacctactaaatattgccactttatataaacatctctcatctatttgttcatttgtttgtttctgttttgttttgttttgttttgttagacagagtctagctctgttgcccaagccagagtgcagtggcacgatctcggctcactggaacctctccctaccaggttccagtgattctcccgcctcagcctctggagttgctaggattacaggcacacgccatcacgcccggctaatttttttattattattactagagacagggtttcaccatataggccaggctggtcttgaatacctgacttcaggtgatcctcccacctcagcctcctcaaatgctgggattgcaggctctcatctgtttttgaatcaaagttgtttggttgttattgtttccttgtttttttgagaaagggtcttgctttgtcacacaggctggagtgcagaggtgcaatcacagctcattcaagcttcagccccccagtctcaagcatcctcccacctcagcctcctgagtagcaggactacaggcacatgccaccatgactagctaaatttttgtaggtttctattttactttattttatttggctgttgttgttggtggtggtggtggtggtgttttgtaaagacagggttttgtcatgttgttcaggatggtcatgaactcctggactcaagcagtccacctgcctcagactcccagagggctgggattacagacatgagccaccttgcctggctccaaatttatttagatcgtctcttattatcattcttcttgatcaataaatgttagtatacatagaaatcacagatattgatgaattataatgggaagtcatggaaagtgtcacacaattaaagcttaattctgactttcttgcttttggtgtgtcattgaccatgttagttctcatctctgatttcagtttctgcatgtacaaatcaagatataagacctacctgaaaaagggttctgaagatgaaatgagattacatgtaacaatatctcagacacaagcccaacaacttgaaagtgtttttctagttatacatttagaagaatgtataactagaaaaacactttcaagttgttgcacatgtaccctaaaacttaaagtataaaaaaaaaaagattagaaaattaaaaaaaaaaaaaaaagaaagtgtttttgtttttgtttttgttttgagacagggtctcactctgttgaccaggctggagtgcagtggcacgatcccagcccaccacaacttccgcttttcgggttcaagcaattttcctgcctcagcctcctgagtagctgggattacaggtgcccgccaccatgcccagataatttttgtatttttagtagagatggggtttcaccatgttaccatgttggccaggctggaaagtgttattttctattattcttggagttatcctgtcttcattccatattatacatactgttatgttgcaattacatttttcataaagaaaaatgaatatgttaactccgtttcaatgactgctgtcacacaagagactagataaaaatttttaaagcatagtcctatgtactttatgatggaataccatctaaaaaatgactgagtcttctacccttagttgtcagagattgtgcttccgtatagctacaaagtttactctaaaataatctctagcaatattaattcagtgattcatatatcaggttttaccacactaaattccagatcttgtgactgtatatcttattccttttggaagttgacaatgtcggaagtctgcatttggctcttgtcataaccaccttatgtttgccttcaatcgccatccatacaggcgagtgcacataaggtctctcacgtcctatgctagatgaagatagattctcaggccactcttaagtgatgaaggctagtctctacctatgaggcacaaaatcagaatagaaatatagatttcttatatcatcatctttttcttccctttctctcacatctgtcttgcctaactccttcaaatttttcctctgtgggaagtgagtcagttttttccttctttgggccattatacacctttcacattttatagcagtatatattgatttggaaaagattcttcaacattctaagaagtacctaaatagggcattaaggtaggaaaaaaagaacatattgtgctccacaaaacaagttattgaagaatgctttgttcttcatctatttttcaaactatgtttttatatcatatgataaaactgggtgtttttagaacatttgtctaaaaatgctatgttacttgtcaattttagtattaaattgaagtaaaaagttctaccgagggagtgattttgcctctagaattcttacaaaatgataaacataacagtaagtaattttatgtatatgaatataatgttttatatcataaatataaagtgcttattatatcatctagcagatgacatctcccttgtatcatttatcatctcttaagaaacagaatctataattactttattcctgttatacttctcctacgtagtatagacctacatccactagaaattaatcccactgtacattgaataagtatctgaaatgtacagcaataaattataactatcttaaggcagcatttctcaacttcagtcatttgataaccagcttcatctcttttctgtattcatgtgctgcctgaactgttacatgtcctctttcttctttaaattgaattgtttttatttattcttatctgtacccaaatgatcagtgaaattaaaagtatgatacatatgccagttatatttttaaatgcacattaaaattaatacaaaatatacagtacaattgtttttcaaaatattacctaacctcagcgtatccaccctcccccagtggttcacagatcacatttttagaaattctgcttttgtgtccaaacatattttgaattaatgtgatacaaaatttagctatgaaatattgagtgggacatgtttaaagatgttgtaattaggatagaacctgttttccatcctcctgtttgtgggtccatgcacttttctccagtaaataatatgcttcacttcactaatgggcactgagtttattcacaaatcattgtaaaagaaactcatttacttccagtccttagcactaaatgttcttttaggatgagaccaataaactgaataaataaaacagcgggataagctttaaaagcaatttcttcccttttttctgctaaagtgaaataataaaatgctggccttggtcttagcctagatcacctgcataatttgtaatcaaaatagtagtattttttgtgattttgcatttattgagaaaatgtgtctttctgtgttaaataaaataaactgattcaactttaatttttgtactgtgagtccagttttaccttctcttccttccaataaatagatgtattaaaactgaaatttaagattatttcgtgaccgggcatggtggctcaagcctgtaattccagcactttgggaggcttaggcacatggatcgcatgaggccaggagttcaagcccagcctggccaacatggcaaaaacccatctctccaaaaaatacaaaaaattagccgagcctggtggtgtgcacctgtagttccagctactcgggacggggccgggaaaagggggttgcagggggctgaggcaggagaatcacttgaacccaggaagcagaggttgcagggagccgaggtcctgccactgcactccagcctgagtgacagtgacagactgagactatgtctcaaaaaaaaaaaaaaaaggagagaaagaaagaaaagaaataagggagggagagagggaggagggagggagggagagagggagggacggaggaaagaaggaaggaaggaaggaaggaaaaagattatttatttgaattttattgctgttattattattattattatttaaggcggagtctcgctctgtcacccaggctggagcgcagtggcacgacctcggctcactgcaacctctgcctcccgagttcaaatgattctcctgacatagcctccggagtagctgggactacaggcgcgtgccaccacgcctggttaatttttgtatgtttagtagagaccagcatgttggccaggctggtcttgaactcctgacctcaggtgatccacccacctcggcctcccaaagtactgggatcacaggcgtgaaccactgctcccggccttaattttaattcaaagtagggatagtcacctttaacaattaatttcgcatcaacacacacaaatacacataaattgtagttttaccaaagtggtccttgctgtttccgtagtgtagaaatagtatttcctccacgaatttagacacaatgatctgaagaatacatacttaaaatattttgcagactaaagtaccaattcaaaaggaatttctctcaggaataaagataggcagttccttaaatacaactacatgaataaaatatgatgcttttaaacttataacaatttaaatatctcaccacgtaaatatttcttacaacactgctgcattcattattatattattgttttattctcagttatattattctttattatatacttacaaatattttattgcaatttaatattgtcatttatggttcgcggttcctactgtggatttaagcaaactttatattttaaaaattatttatttaagccaggtttattggaagacagaaaacaatggagtgaacttttcacaatacaaaattcttagattatttttatttataaaatgtgaagattacattatattttttgtttctttttttattcttaagaaaatgtaacttctggaaaataaattttataaaatataagcagtgacttaatcagtcatagtaatttatgtaactaacatttcctttattactaaccccaattcacttaacaactatcaataaataatgaagacttttatattggcatgtgctaatctagacacaaggagtgtagcgctaaaaatataagtttcgccaggcacagtggctcacgcctgtaatcccagcactttgggaggccaaggaggctggatcatctgaggtcgggagttcgagacaaacgtggccaacatggagaaatcccatctctactaaaaatacaaaattagcagggcgtggtggcacatgcctgtaatcccagctactccgaaggctgaggcaggagaatcgcttgaatcccggaggcggaggttgcaggagccaagatcgcgccattgcactccagcctgggaaacaagagcgaaactccatcaataaataaataaataaataaataaataaataaataaatgtttcttgcttcatggtccatgcaatttaagaggggagatgaaactaaactacatttaaaattagtagtcattttttatgaatatacacttttgaaatatgcagttttcatatacaaaataccagttttgagtatacaagtgggctttcacaaggtcacaaatatagctttggcatatttctttacacttacacaggcccgttcaatgcgtatgcctcacagtcctctttttcagtgtattttgcaaactctatcaccaaaatatctcctcgtaatttgtttcaggctgacaaaaattacttagactttgattataaaaaatacaaaacttaaaaaatgtgtaacggtatacttaattggaagcatctttatattatagggggcattttaagattttgaacttccttttttcacctcaaatagaaatcaccaaaaggaaaccaacaaatccataattattgatttaaaatatggagcctgtagcatttcaaatatctgcacttttaaaaaaagctctggtgaaatgaaaaactaaaatataaaaaagtggcatatttatagcattgtctttaagattgaaagacagtatgtaagtcttttttttatacatccttgtgagtagttatacttctgggtaaattttttacaactttatttttattacttatatgaggaattttatttctacctttttaccaaaccctgaaggtgcattctgggatgcaattatagacaattcttagtgtttgattctaagacaaataaaaaaacaaataatacagaacaaaaagcgaagaacaaatgtcaaagagataagtttaatataaaaatcaaataaataaacttaataaaatactttagcaaataattgaaggaacaataatatgtttgttcagatattttagtcatacatacagccgaactagacacattgcttacttactgtgcatggtagtacatcaacagggttgtaattacgaaaacgcatagaatttgcaacagagattatagataatagcatgcattacattccaaacaagagaatgtctattcccttgaatttctctagcgtaatctgcaagatcatcaatgtctaagagaaaatattttcattcgatgtgatgttgccgtagaggatctcaaataatctatatttccctgatattctgtcttgtttaggatttagatctgtgagttagtattcagcgtagtgggactaactcacttttgtacgtaagaatcacataaggagctgtatacaagtaaacctgactgagcctcactccctaagatataactgcacctacctttcagatcttttgatacactaactttcagtggggattaaagagtttcattttgaaaatgtccagaaatggttcttgtgtatatgccctatagagatcctgtctttgaaattactttatttattctatcacagacacacacacatacactcaacatacaaaaatacacgcacatccactttcatgaaacatttgttacttagaaaaattattacggttttgatattaaatacaactacatatagaataagttacataaaacaaattagttcatatgactcatgtcttcctaatcatgatagttttggcattccaagtttatataaaatagagcttaatgaactagtattacgtggtagttttaacactgatttatctgctctgtgatagcaggtaaattgttataactttttctggtacaagtctaccatttataaataagtttccttcaatctgcaacatccccttattctgtaagtcttccagttggctcggtaaatattacaaatttttagatagtttttaattcatataaatttgatatttactaactttttagttgatgattttctaataacattgtatagtgagggagtgtttcttcaattttcttctgtttagctttccatataaatcaattagtaaggaaagccaaggttatttggataatgtctttaaattgaaaacaaaagtcaacttctgattgtagagaagaatgctgaacaacataccaccagttcctggcacctgtagattttcacgctgtgtgtgtgtttttcttttttcttttttcaacagagataatggacttttctgaaggattttttatttgaatgacattttaaagatctacctaatgcattttttcatactagtgccccaagagcaataatataagtccctgctgggcagtaggcaaaatggatacttctattccccatctgatgtaggtggtagaatataattaggcctgttagaaatcttccttgatgcttctgagcttgctgagaggtggattttcaatcatttacaactttctgaaatctttttctgtacacagcttgaataaagattttcagaaaagtctagtcatatgttgaaaatgtcattttaaaaattgtttttgaaataattctagataatatttttaaattgaatatgtctttttaaaagcatcatttactaatgaactattattttgaagtctataataagacctttcacttaaaaaaactgtcgtcagttttataagataatgtgatagtagtttacaattttatgatagttgtttgggggaaaatgttatttatatactaaaagtgattttaataaggctttgcagcaaaacatatattattttcttcttataaataccatattctacatacagaattcagttagcatttacatctgcttatgaagtagtcgactactacacttgaagaaaatataaaatcgtatcactataaagaagtctaaatatatcagtgaatattaatagacttaacaaaaacaacaaatttctagtaatgtaatttgagttaggtatgtggtattctagtgaataatgttaaattgtttaaacaacaagattaaataaatttgaatgaatgtatgtacagcaatgcattttggttcaatttttaaaaatatatagaaaaacaatttgaataaattatatacaagtaagtatagtatctatgaaaatatctgagcaaacattttaataaaaattgcagcaaaagaatacatttgatgaatttcattgttgagcttaagcatgcaacaaaaaccagtgcgtaagataatactgctttcacaataattaattaataagatggaatccattataacaaaaattgccttaacacagaagttgcaatggattcatttctcttgactcagggattgacataatacatttaaaaaagatatattcaatgaacatattcatttataagatcaaccgtatgtttagtagctgtgtttatagagggtgaaaaactcttaggtaagaatctttcttcgctatgatattatattgtcatgatctatctcttatgatagcatcaatgcttctgttttgtaatccacaaagtttttgtctgactatctaagtctttctttctcagaagttacatgatttttagattgacaataatatatctacttataagataatgtatttcatactctttcaaataagtacgaatagtaaaattctagtatgcataaatcctaccattttacccctggttcatagcgcttaccttgttcactcctttcaatcaccaacttatattttactgtctattacaataatcagtgcattatgtatatgccagtcttttttttttcgcttaaagaaacatttctggcaaaacacaagtcatggtttaatttacttttctcctctttctccacatgcagtagcacagctgaatatagctgaagaaaatcccacagtaattttaagtggtctgtatttaaaattatgttccagaacataacgtaaattctttctgctgcctagaactcatcctaccttttcttggttcattttcttgaccactgttttagataactacttcataaatttttatctattctcaaatttacaaaactcctctatcatcaaaaagctcagctgatgattcacttcctcttttactaattagttggaaacagaagaaaatcttaataaatcctgactactacacctgcaaacatacccagtggaacctgtatgttaccatgaatgaaatatctgagttttcatgtggagtctggatttcatccactctaacatcagtccagtaattcatctccctatatataatcatacctcattgatcattaccataacttttaaagctattcttatttctcttgatacacacacacacacaaacacatacacatccttcatacgtatgtgtatatttatgtgtgtgcctgttcttccaattatctcttgaacatactccagttagattttaccactccactgaaactctctggcaagcttaccaataaccttcactttatgaaacctaatggttgacctagttaaacaacctcttctgtttgtaccatgttttttttggcttctagtgaactctcttggtttttttcttactatgctgttcacttcctcaatctcttttgatcattctttgtcttctaattgacatctaaataattgggcaccctagtctgccattttttcttggatttctctaatgatgctgagtccttggtgatttcatctagtcttacggctttaatgatcaattggattctgtaatctccaaatttcaactgtggacctctctactgaactccagtcttctatgtccaatgacttaccagacagcttcacttggatattaaataaatctttcaaagttaaaatattcagttcaatactgtacttctttttccccttgatttgcttctccctcaatcatcccattctcattaagtggtgtctttttctgtttaggaaaatgcttgaaaacatctttggcttttatttatttttattctggctagaaatacattttttaactgttacttttggttcagacatacacgtacaggtttgttatataggtaaattgtacattgtggggtattgaagcacagattatagaaattcatatttttagcaaattttattagccctactttaaatatatccataattcaattacttttcaacaaccagctgttactgccttggccgaaaccattgttacttgcctgcgttatttcagtaacttttttttttttggatgggttacagaccagcgtttgctttatttgaacagagtttgaacacaacagtgagttcttaatgcatccacccttgtgcctgttattttcattaaaatggttagattgattcacctgaaacaagccatataatataaatgttctgttcaaaagcctttaatagtctcatataatttggaattctctgctcttatttaatggctttacatgatagaccacttttccatttgctgtgacaacctgcttttcctcatattctacttttttttttttttaaacctgaaacagggtcttgctctttcacccaggctgagtacagtgctgcaatcaaggctcacggaagccttgaactcctgggtcaaccaatcctcccacctcagccttctgggtagctgggactacaggcacatgccaccatgcccagcttatcctactcttaagatcaattaatgaatcaatgaaatttcatgtttcctccataaatcctagggcattgcaaactcttcagtggtaatttatccatttagaagactgcaaattgcaagtcttaaattcagtaaaaactatttcaaaactttaatatgcttactgaagtttctaattattttttgtattttctgagagagtgcttgaactgtcaaactgaaatctatatgatagactattgatttttaacaggtaataactatgaatatgtttaggttaattgttggattctttagataaaaactaaggataaagttcagtccactgtcattcaacttacaaaatgaaaagtcaatgtacatgacacactatagttgattttctatatggatatttgcatttaattccgaagttcactatacccagtagagtgacaagagctttgataatactggaaccaaaatttaaaacaaaacacaaatttatattaaatttttagtagcatattcattgataaacatatgaataaatagatgtaatttttgattgattagtgaataatttgtttataaactagaatctcttttggggccaaatgatagagaaagtgataattaacatatcatacacaagtttatagaagcaagagattaaagagcaatgaaactgcatgcttttattgtgtgtattatagagaacattttggagatttattgtgacataactacctctttctatgttactggaaacatggctagctttgtttagatcagcatcataagttgtcatattgcagatattaccactaggtagaatactttttaaatacccactcatacaatttgcctcaattttccctgtactataaatactcaacacttttcatacctgcatatcccaacacagtattacaagctggaaaaaggctgtttctcatcatttttatatcttagcaaagatacatataattttctagaccatttctgcttcgtgggtctttagctcccctgtcaccagacttacctttaatgaaaatatccatagtgttttattaatcatctggtgattgatatacgttaaagattcatcacagtctgacacatgattttctttgattttttatagaaaaggtatcatatagaaaatatactattcctggtactgttttaattattttttttacaaaatccatactctatcaatggtttatggttgttgcagcattgtatattttatcccacactgggaaggtgttttgataagactcctgattttgcttaaaaagcgtaacattttatcaacatttccaactctgtttctcctatacattattttatcttaataacttctgttagatcctctctgaagagtttcttctcttttaattgaaggcttctaacaatcacaaaaagcttgatttgtatatagagtgtttgtataaattacctgttcttcatggagggttgctttacactaagacaacaaaaagcaaaatcaaaactgaaaagcaactcagtggagttcatctatttgttttccacacttttagtttttagccactcatctcttagagataggttgtttctatgtctctataacaaaaataatttgatgaaattgcggttttcagattttaatttttttagtattttgatgtttctttcatgttctgtataaaatatttccaataaatataggcatatttatttaaatataaatctgttatcaattatacatgagttaacaagacagcctgaggatcattcaaagctcacaatatagatatattttacccttcttgaacttctcacccaatgtgtagttataaggcatcatgacaaataatgcatatgaatcattcagcatgtctccatattcaaaataaaacatatatttgctataataatatcagcacatacaacagtaattatacatatagactatataagatttcttatacatctaatgacataggtatgttaacatgtatttagcataatgtgattgtttaaaaagaaaatgtatgtgtagcctgtatatatacatatatacacatgtatatacatgtatatgtatacgtatacataaatatgtacatatacatatacacatacatctatatatgtatatattgccagatacttttaattttatggtatcagtccaataaaattaatactttgaataaggatgtgttctataacataagaaatctcatattggtgacaaaatgtggtcactagatgtcactgacattaactatggaactagtgacaatttaaaatactttttagaacttccataatggatgaagtggggcctgatttgcacaatgaacttaaaaatcctcagcaacaacaaaacaaaatgtacaatgtgatgggcagcacattgatccccaagagaagagaagcatgtgatgtaagctccattattgctcaagcctactgcctggagagagatttcaggcgggagcacagggatgaatgcttcaattgttttccctgttaggagacagtgttctgagtttgggtgacaacgtgtgctggaattcgcacagtggggtagctgaaagggcagagccctgtggagatgacagaatttcacacacacacagagaaatacctccggagatcttcagtgctttccgttggagatttgagctaattattgcttagtgcgtgtgtgtgtgtgtgtgtgtgtgtgtgtgtgtgtaaaaacaatgcaaggccttggaaagaatcattggaatgctagaactgttgctttggttgtgtggccaaaatagccctaaactaaaagttgttcccaactcacctaacaaagcttcaaagcaaacctcaaaggaataaaattgttttcaagtaacttaatgtctcagaagagagactggacatacataaaggaatacaaaacatatagcactcaaaatatatcagttacaatgtctggcataaaattaaaaaaatcgtggcatatgcaaggtgaaaaaaataacccataataagaaaaaacagaaacagtatcaatagaaacataccatcgatgacatacatgatggtagtaggcgagaacactacccgatcaattgttttaatgggccctgcatatgtatttagaagatacagaaaagcacaagcacaacaaggagagatgccgatgatataaaacagctcaaataaaaattgtatatattgaaaaaacaacattttcaatactgaaaatgaccttggacgggattagtagcatagtggatactgcagaaaatgactagcaaaatcaagacatagcaccataatctatccaaaggttaagtgctatgatttccttttgggggagtaggtacccagtagtgggattgctgtctcgattgatatatttagttctttgaaaaagctttgtactgtttcccgttttaggcaggaaaaaaggtgaatatatcctttgacctgaactgtgtcttttccatgctgtgagtatggggtggacaaaggctcagaatgggacttttatttgttctggtagatagagcaagaagcatagagaagaatgttcccaaaatattctgagtttcttcatagtgtatttactgtatttttccactttgggagatttacgtaaaaacatactaaaggacaagcgcaatgactatagttaacatttgtttaatagttattatacgtcacatattgttacaagcatatcatatgatattgtagcatctcctgtaggatattgtgcttcttgcttaaaaaaacaacctctcatttgtctgtaatttgaactagattaactatactgcttaggcactgggtactaattatatcactgattttaacaatatttatcatgtacctagcatggagcctgcctaatcttatttaattctcaccagatgtggattaaagcaaccagcactaaatgagtgcattagtccacttgtgctgtcataattcttcagtaaaatgtcatcaaaatctcagtagctttcaatacaaaagtctgtaggtctcttttaagtatgctatagcagcatgctctagacctgagtctggtttctgatctgctccacatattctcttaattcaggaaacagcctgcagggaaaatcccatctggggtgtgatgtttgaaaatttccatgataaaatacaaaatgtaattttacaagaagacaagtactagagaatagtgtcatcaaatcccatgtatatgtcacccagcttcaatagttatcaatacttttcccttccaattcacacgttttaagtatcacactttatctgttttccagtagggaattttgactttgtattagataccaaaacattttaaattttcgattttaaaatagttgatccatatgatgtatgactccctcaaaaccttgaaacaatgcagtcaatacttactaatgactagttgtatgacttgagagcagtgtggtttaataacatggtatcgctgttcacagggtgaattcaattatgtggcatacattatcaccatatctctgaccatattataacgcatttttaaaaggaagagcttcataatataatttggctcattctttcagatttctctttgcggttttcatagttttgtgacatgaaagtaaattttacaagatgtacattttagatctgactatcttcttggcttctttatctattggtgattttttttatagatttagggggtacaactaaagttttgttacatcgatatattacatgctggtgaaatctgggcttttatattcaccatcatcctgataatgtaccttgacaaggagttatgtgaaatgttttattatttattatagcagttgtctcctcctatagtagttatttgtcctaattgtattttgtcttttactaaatatattatgtattggccatggaaaaatactataaattatttgcacgtggttcatgggatcaagagaaaagtctagcagcaaaataaactgtcaattaaatagagtatgggaaagttattattttactttgagatggaatatatgtagaatgcttttggaaatcacaatgaaatagatgggtgtatgaaactcatatttattgcttagatctgcatatcagtagctttagccaatttattatgtactttacagatgctaaactccaaatattcactcatttaatctgcataggtatcctttgaaatctgtattcttatcatacccattatacagaaaagcaaactgaggtaccactaagtaaagtagttaatctcaggctttagagattataggtgccacagccaggatataagcctatccattctggttctgcaatttatggtcctaactattatattacattaaagtaggtaggatgcctgtgcaataatataaatactcaggtcatgttttgaaaaccagcattttgacaactgtctgttggaacccacctagtctctagtctcatgttttaaatttaaaaataataatctctaaaaggtttattctacttaaagctttattatcataatattttaattttaaatattatttttaaagtattgaatatgaaatacggaatagactttatacatgtattaaaatatgggtacttattttaaaatataaatgtatacagccatagtataattttatgtagaggtaacaatctactaatgtagataacattttatacctaaagggtctgtgacagaatgcaagaaatatttcttttctcttttctttcatcaacactttctcatttggtcatttactaaaaacactttcacttccaccttaatatatttctggaatccactcactcttttccattttcactaccattacctttcccagcatgtcatcagtgtaataatgtatttccagttgttctccctcccccaccatcttagtctgttcacgctgctataacaaaatactgtaaagtggcttataaacaacagaaatttatttctcacagttctagagactgggaagtccaaaatcaaggtgctagcaggatggatttgaggtgtgctgagggctcactttgtcaaagatgctgttttcttcttgtgttcttatatggtgcatgggactagctagctttctgtgggctcttttattgggcactaattctaataacaagggctttaccatcatgatctaatcaactcccaaaggcccaacctccaaaaataccagcacagtggggcttaggatttcaacatatgaactttgaggggacccaaacattcagaccatagcaccctctctaatttactttttttcctgcagtgtgagtgatctttttaaatcacaagtgcatctactttattcctctgcctaaaacctatcctgtccatttccaattgttcgtaaaacacccaataaccttcaactgatatttaccttttcacagtgttatttatgtataagtcacatagcaaacaattcacccattaaactgtgcaattaaaagccttttttcctagagttgtgcaatcataaacacaatcaattttggatcatttgatcacttcttttggtcatcaccccccaatctcctcaccaccacctcccattccccttgcctgccctaagcaaacattattctacttttttgtatctatagatttgcctattctggaaatttcaaagaaattgaattattcaatactagtcctttgttatcagctttttcctcttactgtaacattttcatgattcatccatgttgaagcatgtgtgagtacttcattttggtttttctttggccaaataatattcctttgtatgtttataccacttgtttttttcaatccatgcaccagtaaataggcatttcagttgttttcactttttgacattattaataatgctgtcattagcatttatgtacaagtttttgtgtggacatatatcttcatttctctttggaatgtaattacaattctctgtttaacatttggaggaactgtcaaacattttatacaaaacatctgcaccattttacattcccactcacagggcatgagggtgccaatttcttcacatcctggccaacatgtgttactatctgactttttcatggtagccactccaatgaatgctaagtggtatcatgattttgatttaaatgtccttgatggctagtgagtttcagcatcttctcatgatcttattggtctttcttttgcttgggtacttcttattgtagtcttgtttatttctctaactctttcatatcttaccccttcaacctcatatttaatttgatagttccagtgagcccctttaaactctttcaacacagctttttttttcctcaagttcaagcccacacagttaccatttttttcctacttttcttacttttttattggtgagggctgactttgtaggggtacaactcatgcaactgcacagattctgcactctttaacgaccccaagtttgagctaatatgctgcagtcatcgtcatcttggcattttaatagtttttaaatagaaactcccacattaaattttgcaattgccccctaaaattacatagccagtacagttcctgacttatcattttgacttgtccttccgttttggcataaatacctacgagaaactcttcctcacctttgtctaccaaattaggtttcctttctgaatgtcatctatatcagcatgcattataatttgtcattttttcctctgatccttatgacctgagagaccaagggctttgctttcttacccatttttctttttttatatgtaaaagtaaacgtgctaatttattcccattaaagcatcaaaaataaatgttttgtgtctaatttttgaaaccaaatattgtacatgccatcaaatgtttcaaacatcttattggcatgttttggtgtttgaaatcctcatttaaaattgaataacatattttaaaaacaaaaattagaaaaatcactaatgaaataaacacatttagtaggtaaaaatgcccacttttcaatttgagtgaatgcatttttctagccccagaacccagcaaagtgtctattacatagctgcggtacatacatagttcaaactcatagttgctactcaggtggtaaatcatatatcaaaaataatcaaacatgaactccagggctagacaacctggtcattcagctgctaaagcttataagctgtgggatgtgggctagttattgaatatttttcaatttcctcatcttaaaatggaaatactagcctcagcctcatagtgatgtcatggagattaaatacactagtaaatgtaaagctttttggatgttgtctaacaagtataatttatcatatgtatgtattgccttttataattattacattcaattcctatttgttgaataaattttttattttattatcaaagaaaagagaaagacaggaggacctaataagaaaactacctaagtgaagaactttgattgcatgtatttatctttctgacatcatttacactgctgggtgaaatggtaattatacaagaggtcagctcatgaaattgaaataagaggaagattagaaagctaggagcaaatccagaggaaagaacattattgctaatagtaaagagaagaaacttacagggagggaaaacagtatttctgtttaaaattcttagtatgactgtagaaactggtggatttgatacattaaaacagttttgagaaggtagtttggataaattaattctaataacctttggagagtgttggtttttctgtctacatatttagcagttatgcattgtctttacctcagagtatttgaagttgagtttacttactcgatagagaaataatgccattaggaatgaggcaaacagaatacctatagaaggcatccacaatggggtgcatattcttttgtgtatctgcattgatcttgcattctgcctatggtccctatttacctgtccatcatcaggagaaccacatgaccccactgtcttctgtgcgtattcttgcttctctcatatctttcttatgtcctcttagggcatctgcctggaattcttccctcaacaccacccttctttcactatttacagatcacaatccacactttggtttgtcaggaaacatacctaccccattcctccacttactcctagaaagatatagtttgcctacctggtgcttttcacatttatttgaattgtactgtaaaattagtatctatcttgtttgtttaactttaatgccaccaagggtagaaactattacagtttgctcagcactgcatcgcagtgcctggttgcttattgtaaaataaatgcgcgtgcacacacacacacacacacacacacacgctctgacacaaaataattgttgaatggttaagtgagatgatccatcaatctcccaaaaggccaaaggatttaatgactctaaaagtgttccatgacacagtagaaagaatagaaagttttggaatactggccacctcaaatgtgctgtgaactctaattggattctaaatttgacaataaacgtctagtcaggtgaggccacaaaaaataacctataaataatgacacattatataatttcaattgtttgacaattaaaattgtcaacaaaaacttttagttgcaaataaactcaagaagtggttatcacatggatatttgattaagggatttttgaaaggacaataaactctaaaaataaccatattataaaaatattgaaataccatttaaataagcaattcttaaactgaccttctagaagggcaaagaacataacatcaaatcaaatttcagagagtgcgtttttgtaaaggatggaataataatgtacagtcagacactttgttttctaatcatcttacttaattcagtgatagaacctggaaatactagatagacagcaaaaatgctcattaacctgtctcaatcaaatatcagatgtcttaaatgaatctttagtaggtgttgaatcagagccaagatataaatgaattttctttcagatatttgtaatgcgtttctgtagcacaaagagacatgtcctttagaatgtcagaaacgaaaatagaaaatgaccttggacttttagtgcaagtatttgactcaaatgcatattgtgcatcattacagagccagtgatgaacctgagaatggcttctaactttcctaggaatcacacacttgggcacagtgtctgtttttccagaatttatgttaataatttcaggtatattgataataacttttaaatgcaaacatttttactaataacatctatatacaccaatagtttttcacaagtcaaagccatgtcatgtataacaggtaattacaagagaacatgtttattttcaagcgaagatcatgtaactttaaaatttacttttcaatactgtgaaataattacgtttcctttataaaaatgaataatttgctttgcattattaataatgtattttgttgttatattccaataaagttaattaagtacaagtgcttaactcatagtaaataatagctgaaggagtacattttctttactcaactgcatgtaaatttcactataacataatttgctttctaaaaatattagaatatactgtttctgtcctagaaatttaagtgacttttacgtgaagtaccataaatattttcttacatttgttcaactatactatcacactatgggatgaaatctgaagttccagcaagactttagtaaaagcaacttattccaagaaaattatgtagttcaaataagtcataattatttaggcaatcaggaactatttttaatacaatatgaaattttgccagtaacttaaaggatagaaagtaggatgttgccatgtaaatatagagagaaaaaaaggggaaaagtgtaaaacacgtctgtgaagagtgtttattcaaagcacaggatattgtggagagtacaagtaattcaaaataattggaattgacggtatccaaattgtaaagtgtgcttggacagaaaggtgataccacatgagagatctttaaacatcaggctgagtgattgggttttgtttggagtcattgaaatgctttttatcattatacagccagggtacaggaaaccttcatgaagctatgagaatgtaaaaagtgtgctttttaaaaaaaacttattcttagctatacaagaaatactttctacatcaggaacagtttcttttttctttttgccagagaaacatgggaagtaacataatgttatatgtttggtcaccattttgcacacacaagcataaaatctttctttttcctgaatcgatgtaaacagagcctggacggccgtatcgaagtcaaagggcagcatggaagctcatcactgcatattaaagatgtgaagttgtcagattcagggagatatgactgtgaagctgcaagcagaattggagggcatcaaaagagcatgtaccttgatattgaatgtaagttactttcctttgtattttcattaaaataactttgcatgctttgaaacatatgatttttcaataaagaccaaaatatatatgtagttcacatttcagtacttaatgcatagctttagaggaaatataggaatcattcagtcagttattggagacatctagtggaaattacaggatatttcacagtgctgtatatttcatcattttgatattgcttttcctgaaaatggtctttctttttttgcaacattgaactcaaaacacagtatcaactgaaaaatattaattatcagtaattggtcgatatcactttagattttttatttctttataatatttatgattatgtctcaaatatgtagtgtttacatttcttattcaaattgttttgttaggctattttacattttcataaactataaagagtattttaaatgcagtgaaatgtactaatatgctgtcttatcaaaatagtgtttattttctgtctggaagaaaggagcatgacaaggatagtttttaaaataaatttaaaaatgtacataaccacgtgagttttgggaaatgggagggctaatgtaagtcaagctttcacaaaacccctctggtcactgcatggaatttaaaaataatttggtatacatgctatttaaaaaggaagaaacttaacatcattctcaataaatatttatgaagcatcaatattggagagtctctgatgcttgaaaggacatagctgttcttagtggaatgtatgagatattcttattgacaaaatatttctattggagcatgtctagtacattaatattgatagaatgcaatggtaactgtgaaacaagatgcattctcttatcgagaatgccttcaaaaagaaaatattttctcaagaatagacataagttatccatattattttacattttatagactgtgcttgtcaagaaattcatggaaagaccaatcagaaacttctaaaagaaaaaaggactgttgtggggttgggggagaggggagggatagcattaggagatatacctaatgctaaatgaggagttactgggtgcagcacaccagcatggcacatgtatacatatgtaactaacctgcacattgtgcacatgtaccctaaaacttaaagtataataataataaaaaggaaagaaattcccataataggataaaaagaaaacaaaaacaaaaacaaaaaaaaaaacacccactgatatatttgttaaactatacaattcctggatctgtaacaacctttttaaaactattcatacagttgttggaatttactaaacttcgtaactaaaagaaaaaaaaagaaaaaaggattatgaaaggcagtcaacaataaaaggcaacttgattctgacacaaattactgacttcatttgctgatattaggcagcttctaagaaagccactttatttccatcacactttctaaaaaaataaaaatggaaagcattgataatattgagaacacacaaaggaggaagtgatgccaataacttacttaacctttttcccttaataattttttctacttttttccattattacagtatatttctttttcagaccaacaacatcattagcaaattataaatactttacacttttacagtacatttgttatatttttaattaaaatttgtttatttaaaccaaaatttactttatgattttttttaatttttctaaatgtgaatctaaatgaagaaaaaaaaaacttaagcatgccaagatatgatttatatgagacctcctggcctcttccactgtcctacaaaagtgctaggctgctaggcaacatattatcttaatgaaactatatttaggacttttattctttgcatttcattaatattttaaaacatttgctgtatcataggattagtactaaatgtctgttgcaggtcctcagaaaagtggagtttatgagaaatgaacactatggatatttccaaagcacagtaaggcagagtggctcgtacaagatatgctagtattagaataataggactagctaatatgttaattaatagtgtgttatgtgtccctgagtcctcaatttccttagttataagataagagggtttaaagaagagactgttgggacctatttatactcaagcatttaaagatacttttattcaagcgtatccacattctccagagatgccctgggatttctgaattattgtccatgcatgacagcataggtatttgtgtgaaacaaatgaaaaccgaaattaagattataattcatatatgtttatgttgtaaaacctcactgaaaatagttttaaaaaccatactaggtccaccttaagcttcaggttttgtgctgagtgataatggacacaaagatgaataaaacatagctcctcctttattagaagtctaccatcaacaggagtttaaattaaaccgcagcatgtattcagatttcaaagtgagaatgaataaaatatcaaattaatgtaaaatgctaatacataattacatgagatttttagttattggttttagctgggtagaaaataatgggataaacaaacaactgtatattgcaatttgaattatttgctcttgtaatctattaataccatgaattaataactttaatacgaaaaaagtacattgggtactttatttttcaaggactgatttctaacaaagtacaagttgcttttgatcacattgcattccttctttataagtttaaatattggtttatgtttctgcttaattattccaaggtaaatgtgcagacttaagctcaccagaaaattatgtagtttagtttatcttatttaaacagggatgaaaggtcttgttttctaaaaggatgttttgagaattatttgagtatcccctgagattattattgccgccatcttgattagagggtagctagattaatatacattgaaaaaaattttcttactattaaactttcatgtaaatataactactttttgttttccctaagcattgattatttttctgcaaatattgttgaaaatgagttgaatggctcttataacacttgatcatttttcctttttttccaaaatgaaacattcaaatttattctacttgagtggggataattagaaaaataaatatcatctcttgttaagacattattcaaatatatttaagtacaataaaagcccatatataatgtaaaatatgagttttgacctatgtatacaccactaaatctataataatcatcaagataaacatttacatcaccctcaagaattttctcaagtcactttaaaatctatccctcctttttacaactatccctaggcatccatttatctacttttgatcactacaatttagtttacatttacatgtaagaatgtatatacatagagtcatgcagtattatttttaatttactttattatctttgaaatgtacttatttacttttatttagttatagttgacaaataaaaattgtatatatttaaggtgtacaaatgtgatgcttttaaaaatttatcattagtattatttttgattggccaacaataattgtatccatttatggggtacaatgtaatttttgttatatgtatatagtgttaaatgattcagttaagctcattaacatgtccattacctcacctaccttttttatggtgagacatttaaaatttactcttagttactttgaaaagcacattattgactgtagtgatccagctatgcaataactctcaaaacctatttctcctgtctatctgcctgtctaccctttgatcaataactccccatttccttccttcccatgcacccaccccagcctctgctgacatcattttactctgtttctgtgagttaaactttataagcttccacagttaaggaagattatgaggtagttgtctttttgtgtttggcttatttaactgaacaccagtgtcctctagattcatccatgttgtgcaaatgacaagatttatcattttttaaatgctcaatagtattccactgtgtatctataccacatttcctttatcctttcattcattggtggacatttaggttgattccatatctaggctgttgtgaataatactgtcatgaacatgggactgcagatacctctaccaggtacagacttttttttttttcctttgggtataaacccagacaaaggattcctgaattataaggtggctctcattttctttttgggaggaacttttataccactttctatgatggccatgccaatttacattcccaacaagtgttcctttttatctacttcctcttcagtacttgttattgttcatctctttgaataaagccattctaatgaagtgatttttcactctggttttaatttgcattcccctaatgattagtgatgctgagcacttttttaggtacttgttggccatttgtatgtcttcttttgagaaatatcaattaaagataatttgcccattttaaaatcaggttgttttcttgatattgatttgcttgagttatttgtatattttgaatattaaccctctatcagatgtgtggtttgcaaatattttctcacattatttgaattgtctctgctgagctttcacagctggcatacattcgcatgtatatgtgtgcatcaataatttatactacttgttcctgttattacatcctacagatataacagagtttgtttatctagtacctattgatggacattttacgtgtttttagttattgactactatgacaaaaaacttctgcaaagatttttgcagattgtgtggatatataaatactattctctggaataaacatttttgtttgatttcttcaggtaaatttttcaaaagcaaagaattataattttgctgtcgtctagtttattaaatttatcaaactggacttttacatgttatacggttcgtgttttttctgaaaaaatattacctaatttaaggccatgacaatttatgtctaagctttctttttaaagttttgtagattttggttttaccttagggctgttattaattttgagttcatttttgtggagtaggtgttcattatttttccatgtttatttctagttgatcaagcactagttaatagaaaggacttttctttttctagctaagagtttgacaaagttgttgatcttttcagagtgttagctttccattttgttaattcatattttctataatatgtctgttttccagtttgatgattctggctttatcttcattatttcctttcttctatgtattttgaattcaccatgcacttagttgtagattttttaggtggaatcttagtatatgtattttagataattcttattttctaatagaatcacataactccagattttcactaagcagtgctttaacggaaccccccaatattgtagtatgttgcatttttgttgtgattcagctaaaaatataattttccatttgatttcaactttggctcatagttatgtacaagaatctgtttaactttcagatatttggatttttccttgatattttgctgttattgatttctaatttagttcagttgtgctcagaaaaccctgtattttttatttttatatgtataaagattttatttatatcccaccatattaactattttggtgaatagacgattttacttgaaaagcacatatattctgtagttgttattgtgttttaatgtcagttagatcaaggtaaattatggtatttgcactcatcaggattccttagagggacagaataagatatatatgtatatatatatatgagtttattaaagagtattaactcactccatcacaaggtgccacaataagccatctgcagcctgaggaccaagaaacccagtccgagtcccatagctgaagaacttgtccaatgttcgaggacaggaggcatccagcatggaagaaagatgtaggctgggcggctaggccagtctagtcttttcacgtttttctgcctgctttatattctggccatgttggcagctgattagatggtgcccacccagattaagggtgggtctgccttttccagtccactgactcaaatgttaatctcctttggcaacaccctggcagatacacccaagagcaatactttgcatccttcaatccagtcaagttgaccttcagtattaaccatcacagtattgtttaaaacttctatccttactgaatttttattatagctgtttgatcacattaagaggtattaaaatcttctaccatgactgtgaactattttttctctcttttctttgcattatgtattttgaggcttacaatgagacacataaacatttatactttgtgtgttgtgttactttcctgttgctgctgtaatcaattacaaaagacttagttgtataataaaacaaatttattgtcttaaccattttggaagtcagaggtctgaaatgattctcactgggctaaaatcatgtgtgggtcgggctgtgttcccttgtggaagctccagaaggattctgttttcttgttttttttttcagcttctctgaggctgcccacattccttgcctcatggattccttcctttctcagagcctgcaatggcagatctagtctttctcacatcatatcactctgactcttttttcttcttcacaagtccatctctgtctcaaactttccttgcaattaattgcatccacttggataattcaagataactttctcatgtcaacatctttaccttggtcgcagctggtaatgtgtttgcagtttccgaaggtaaaggtgtcagtatctttgggaggtcgttattctccctcccgtttgtgtctttatgaatatcccctttcatcagaattaaatacctctctttttctctgctgatctctcacttgacatatcttagctaataatcaaatatctacgctagccctcttatgctttttgtttgtataacactttccattcatttacttttaacctgtctgcatttttatgtgaaattaaaatgtgtctttttaggcagcatatgatagaatattgctttctcattgactgtaaatctccttataattggagtgtttaacaagcagtcagtaattaacagggtcagggaataaatattttactttttctgggctacatacagtctctgccatatttttttttctcttgtaaaccatgaaaaatgtaaagaccatcctcatctctgagtcacatataaaagaagcccttgggcaagactttgcccatgggctataatttgccatccactggtttaggctattaagtttaatgccattgttgttactatttcaattaggcctacaatttttatttatattctgttttttttcctatgtttttttcacattctatgcccatttttctgccttctattgagttattcgaagttttagtatttgattttaatttatatattggcaatatttttggtttttgttttgtttcattttgttttgttttaagcgattctataggaattttaaaatacaaacctacattttcaaagtttccttgaaatagacttgagttcatattttgacactttacataaaatgtgaaacattgcaaccatttggattccttacacacaccttatctaattatctttttgacatcatgcattacatctcaaatcattaaaaatcccatcaggaattaagatattttttcttttaagtagttacgcatattttaaagaactaaaaaaatattttatatgtattcatctatatgtggtttctttattcttccttcatttttgaagatcccaattttttttcatctgaagaagtttcttctccatttcttgtagagcagattttccagagataaattccattaatttatctttcatcaaatgtccactacacctcttccttcctatttctgaaggattgtttttctttgctcttgagaattctacattgacatttctttaagcatggggtttcactatcttctagtctcctctgttttcaaagagaaagccatataaattgacccattgttccctcatatgccatatatcattttatctaactgctttaaagctattttctttacctttgttatttatcaatttgattaggataagtctaagtattgttttctttgaattttcttatttggagtgtactgagcttctggaatgtggggatttatatttgtcaatatgcttgagccactatttctttctggccactatttctgcaatttttttgtgtgtgtaatctcttactaatctctggaactttacttacacatatgttataccctttgaaattgtttcacaggctcatgatatacttttcagttttatctatctcatttctcactgcccttccaattaggtaatgttctcttgtttcctcttcaagtcaactgactctttaccccatcatctcgtttctgctggtgagccaatagtgaaagtttttgttttatttcagggattttttttttttttttgagatggagtcttgctttgtcgcccaggctggagtgcaatggtgtgatctccgctcaccgcaaccttcacctcctgggttcaagcgattctcctgccccaaccttctgagtagctgggattacaggtgcgtgccaccatgcgaggctaattttgttttgttttgttttttgtatttttagtagagacggggtttcgccatgttggccaagctggtctcagactcctgacctcgtgatctgtctgtctcggcctcccaaagagctaggattacaggcgggagccactgcgactggcccaaatagtattttttttttttaagttctaaaatttcaatttgctccattttattctttctgtctttttactgagaagtcctatagtttcatccatttcattttatctattttagaatatatacattttcttcacctcataaatgataagcaaagctgctctaaaatagttgctctaaaatctactatctgataaatttaacatctaggtcattttagtatttgcatgtgtttgttgtattgttcctttacaattcacctcactgtactggttgtcaaaaaatactgaattgtgtcctggatattgtaaatattatgttgtgcattctctgtatctttagataaatatgtggggattttatttttcaaggagttaatcacctctaagttttgtgttccatcctgtcagcagtgactcaaacctcaagtgatttctcaaagcttttgctgtgctggtttgtgcgtgcagagctagggcataggctaaaatttctgtgggtttttacacagaattttgacatacccttctctgactcctagctgagattaccctcacactctccaacattatgtatgcttttttccaagatacctctgtccttctggacaagttttagttaccacgatcactttgaacctcttcaactagggcccgtcccctgggaaaagccttgagagaaaaacaaagaaaaaaaatggaagctagttttcatttcccatcacaatcttcctgatttttttcctcttgagaacccttggatagttgtttttgaaatttatttcatattattttcagagttctaaattcttattagtagtgaagatgtactatcttgggtttcagctgccattatataatgaaaaatctttatatattctacttctagtacaactttaaagcattaatatatttggtatgtctagtgtctggaaccaataacctacgtgttttagtttcagttttcagcagtatttttattatttttcttttttaaaatttatttttcacattgtttagagtattttacatcatatattctcaaaaacattatttttgtaatgtaagattgtttaaactacaaaatttaaaaaagtgtttaagtatcttttctttctgtcagtgtatcagtcctttggacagtcaattttgtttaatattttcttcattagcctggtgtttgttgacatgtttacatagagacaaaaactatcttcatgaaaactgtaataagtttactggtagatatataagtattttaaattttaatttgaaagatattataactttagctgaatttagagttatatgtttaaagtcttaaatagtatcctttaactataaaacgttatttctactcatatagaatgaatttcacataaagcaaaagaaaatctttaagatcactaaacaaattctcaaattttgtcatggattatatttacatattttattttattttttatttctattgaaagttttttttcttatggatctaacctatgcttgatgaatgccatttttagactggttattaatgtcttacatgtttgttataaattacttgtgagtctctagcagtctagtttcctttttgattaatctagattcttatagtatttctttacatacattcctgaaaatttattatttttcacaattaaagttactcatgaattccaggaaaataccaaatatattggaaatctacctcacgtttccaaacttttgctacatataagaataaatttttaactttagcatgatactgacttgctcatatatttgcctaacctcttcactattgtagatacaagattattaccttctaagtgacctataattaattgaaagaccaaatcatgtaaataatgtttaaagtagatgaacacgatgatagaaaattcacttatggtaaattatataaatatgctagtgaaagattgatgaatacttaagtagaaagtaatataattcttaatattaatttcattagttgctacagttcaggttttattttttgtaatagaaatagaaaaaatatcacgagatatatgtctacatttagtggggtattgggttagataaccatttggaatatgtaaccatgattgtaatttaaaatttagcctgtcctctcttttagttacactccttttaagcctgtatgattgtattatgaaagttgaaacttgtttttttttacgtttatgccaccactatttattaaatcttaattccctttatgtgaagattatgacacatttttagttgtatattgcaatcaaatgcccatgatatatgtggaagttgtctaataagtatattttttggcagttgaagcctggtttgttattagatattttatttcgcaacaaattcataatagtaataaaactcttagtaccttatgtgaaaggccacaaaaagctattgtcgtaattaaatatttacctattaataaagctcagaatacttttgttatgcatcatggccatcaaagttgtatggagacaaaaaattacaaagacattacacaatgttaaacacacacacacacacacacacacacacgcacacacacatacacacacacaattaccagaacagtcttataccacctgaaccaagcacctacagggtaatactgctaagagtgagtagaaaagagtcaaaccatttataatttgatagaagccgcatttactgtaatagcactaaacttaaggtgttagaaaattaagcctttttttgctcaaaacctcttttgtgtttcagcttaaacagatttcttggcattcttccagttcattttcaacatttccgaggcgttactttactaagaagcaggaattgaactaaacttccaatttctaaaacaaaggagaaaacaggcatgtgatatacagtttaatgcagtaagcactggttacatagtatgtttgattacaattagaatatcattaagttttgtgactaggtaatcattacatagtaactattaattagacttaattattttatgtataaatttaatttaacagttacatactaacaatgcatgctaagaaatattagaaattttcatttactttttttttctatttgagcttgctgcacctgcctttaattctccttagacataatggtgatttgtaaatgcattttctcctgtagtataaaagagagagttagcagtatcagatacattctaaggttatggttacattaaataatcccataacacagaatcatgttacttatttacatgctgtccatataattaatagatgtgtgctttattgagtaattcttatctcaaattctctgaatataacagtggatgtacattctctatatataaagtgattttactagcatgattggttagatgtataggatgaggtaaataagatgtgaacataatttaaacatataaagaagcttatttcagtaaacacttagaaattagaaaaattccttggtcatagcagacacacattttatatctgtgattaaaatcttgtcttatgaccctgacttttacactcaccatagtacatttaagccaatgaaactttaaagaagatggctcatttgcagacataaattggttctactgcctgcaactatttaggttttatgtccagtatggtaatttcaaggacagcaactgagaaaaatggaaagcatatctcttcatccagaagataaaaagaacagaccattaaaaaagaaaggtgaagagtcttttattgttaagctgtagatttttaacccaaactttatgtgagccccctgggaaaatgtgaaataccacattcttcatgtgtatagatactgtcgattgtcctcgttttataacattattgtctctctgacaggtgttatttgattcagatcagatcttgttaaaatgtatttcagagataatggtaagaaaatttttaaggaactttaggaaatattcaatccttgagatgataagccttagaagtgaacaaacagcaaacaaataaataaaaacatattttgtaactggatttatcactgcctgttggcgtctgtttaacagtcagaaatactaaagtctacttgaatcttacccttgctttctgtcctttctctggaatgaagaccttgccctgggaatcccagttctcactgggacaatgaatatcttagttcaagctgctgtactaaaatagcacagatagggtgggttaaacaacaaacatttatttctctaaatctaggggctataagttggagattaggatgctagcacggttgggtgactggtaagggccctctttttggttatgtactggcatggcctttacttggtgcgcacacacacatacacacacacacacacacacacacacacacacacacaaatctggtgtccctttctctttttataagggcagtaatcccatcacaggtgtttcaccctcataacgtcacttaaacctaattgctccccaaaggccctacttccaaataccattactttgagggttaggaatttaacatagcaatttagggaggacacaagcattcagtgagctttctgggtttaacagagaagacacctcatggataggacaagtacagaatttccacagcgtgaggggacagcaagtcatctgccacaaggtcttagtgtatctttcaggatattcaagacaaaaaaaaaactcagtgaagtctgtaacagctcagtatgatgtgatctcagcctcacactgttcatatggatctaatcctaaaacattggttaattcatttaaattaccaagtttcaatttcccattttgtaaagtgaaagagacatatctatgaattaaggcatactgaggttagggttgtaattaaattttttcaacaatatgaatcagccgtatggtacacaccaagccctcttctaggattttagtgtatagaattgaataaagcaaacaaacacccctgctttcatggacattggcaagagaaaccaatgactttaaaaaataaagtagaaaaataatgtgggaaacagtgagaaagtctaaggaagaaaaaagtaaaacagtgcagtgagacacatcagtcagcttgccataataattatgcatcataaacacccaaaaacacagtgtcatacgataattatcacgttggaaactgctgatcaaagccaggtttgaataaggagcttggcttcaaacagcagtgcttgactcattggtatggatccagtaacacatataaccaggctgaagaggcaataagtacagagaggatatcatcttatggtgatggcagaagcacaagaaaacaagcccgacaacaaagacatatttaaagtgtttgttcacatcacatccaaaaatgtcatgtggctaagccaaacatcagttcatcagggtaatacactagccttctatttggaggtcttttggagtgaaattttgctaaacaatttaatccatatcagacatatatgcttgtgggtgaaattttaggtagataaagaaaatatggtaagagagggacctgctgcaaatgtaggaaaagtacattccaggcagagggaacaagggcagattattcaagcaagagcaattctaggaaattcaagaggcagcgcagaggctaatgttgctgaagctgaataagcaagggtcagagaggaggggaagatgaggccatgaagttaacaagctgccagatgttatagagatgtgctgtccagtccggcagccacttgttacatatggctatggagcactggaaatgctgccggtacaactgagcaactgaaattttgatttctttttactttaattaacttaaatttaaaatgtgatgctcgatttagttattggaaaacttttaagtagttttggaacaaattgagtatgtgaatctgtttattcggttgtacattatataaaatctaaatgcagaagaggctttcccaatacaaatctagtggcttatttgagatatgctgtaagtgtaaagtacacaacaggttttgaactcttagaacaaaaaataaaggatataaaatatctcactaactatatctcactaattttgttacttatttttaatttatatggatatgtattagttgtatgtatttaagggatccatgctacattctaatgcaagcaaaagtgtgtaatcctcaaatctgggtaactgggatatccctcacttcaaacagttatcatttctttgtgttgagaactgtacgagtctgttctcacgttgctaataaaggcataccgtagactggtcatttataaaagaaaaagatgtaatcaactcacagttccacatgggtggggggaagccttacaatcattgctgaaggcaaatgaggagcaaagtcatgtcttacatggtggcaggcaagagagtgtgtgcacgggaattccctttaaaaaagcatcagatgttatgagacttactcagtatcacaagaacagcactggaaagacccactcccatgattcagttacctcccaccaatccccttccatgacacatgggaattatggtagctacaattcaagatgagatttgagtagggacacagctaaaccatattgggaacattctaagtcttatagctattttgacatatacagtaagttattgttaactatagttgccctcttgtgctaccaatcactacgtcttattcctcctatctaactgcaattttgtacccattaaccaatctctcttcatttttccctgctcaatatcctttccagcctctggtaaccaccattctattcttcctccatgagatcagttttttcagctcccaaatataagtgagaacattgtcttttaccgcctgacttatttcactcagtgtcctctggtttcgtctatattgctgcaaataataagatttcattctcttttatggctgaataacattccattgtgtacgtgtctcacattttctttatccattcatgcactggtgaacacttaggttgattccatattatggctattattattattatgaggcggagtctcactctgttgccaggctatagtgcagtggcacgatcttggcttactgcaacctccacctctccggttcaagctattctcctgcctcagcctcccgagtagctgggactacagtcacgtgccaccatgcccagctaatttttgtatttttagtagcgacaggctttgaccatgttgaccaggatggtctctatctcttgacctcatgatccaccctcctcggcctcccaaagtgctgggattacaggtgcgagccaccgcgccacctggctattatttttttttatattgactacgtgttgaaattataccactgtaaatatattggcttgcattatgttattacaattaatttgacctttattctgtttctttttcagtatggctcttagaaaatttaacattgcataggtggctcccattgccattgtctatattagacagcactaatatagagctttataatatcaaggaggactttgaaaaggatgagaggccactggagagttctgatcggaggtacaagcagtcttctcagatcatattttaagtgaatgacctttgcttcagagctgagaatagactgaaaggggtacaaaggcagaagcaagggagggacaccagtagggagactattgcaagacatcaagtgcatttcatagtgttattgtaatttacatcaccttaacataaatgtatataactattagtgaacatcgttttaaaaagaacaaataacatattcagtatatattaattagaatggattacattaaagacaagaattgagtttgttatatatttttctttattcaaatcatttcaagaatttataaaaacaactcgactgtatttttaagaaatgcatgcaattctagaaagcaagagaaaaacattaatcacagggaaatattacattctaggtataatgtaaaattgtgcttttttatgctaaatgtatggtcaaaagagtaatgtgcctagttttaaaatagtattcacctttgtgaaaatatgcacacctatatttttctctaagtggtttccaacttgcttggataatcatcacatattgataagaaaaacaaacaatatttctgtaagttgtcttaaagttattcaagaagaaaatggtatttctgtatattcgtttaaaaacctttgattttagttattcaatttaataatatttagtcgagtgtggtagtgcatgcatgtaatcacacctcctcaggaggctgaggcaggaggatcatttgaacacagacgttcaagaccagcctgagcaatacagcaagaccccatctcaagtaataatagtaataatagaaataataataatatttattgtacaacactagaaatagactgttagtatttttcaaacatgcaaataattgaacatacttacaaatatttcaataagtctagggaaccggaatctacttatgtagaatagcttagaaagcatcataaattaacatacaacttaatgtgcttataagaaaatatgtgtcatagatagtatacaaatgagcaataagagaaaaaactctttgaaaggtaacatcatcacagtattttgaagtagaacctaaggaggagataatattgaatctgagtctaatacaacattaaaacaataatgatcagataataattaatctgaatcaaatgtgatattaaaacatacatgactaattcagattagtgtatttattcacatagatcccttcattgcaaatttacagctcaccaacactaacatgtcttctctctgctttagtattgtggacatgaaaaatttcctgcccttggaatgaagatgaaggcttaatcagagcaaatctcctctttaaatcattatttttagtactcttggtatctcagaattcttcacatgcaacagaatttgaaacattgctggttaggtacaagttatttttatgataatcctctttgtttaaatgatctttgatgtttcttgggctgctaataattttgctaagattgtaagagcaattatcaatgagttcagtctaatgccaaaaaaaaattcttatttttaaaaaacttttaaattcaggggtacaagtactggtttgttacacaggtaaacctgagtcagagggtttgtgtgtctgtgtgtgtacagattatttcatcacccaggtattaagcctagtacctattagttatttttcctgatcctctccacctcccaccctccaccctttgatagttcccagtgtgtgttgttcccctgtatgtgtccatgtattctcatcatttaactccaacttataagtgagaacatgcaataattggttgtctgttcctaagttagtttgctaaggataatggccaccagatccatctatgtccctgcagaggacatgacatcattcttttttatggctacatagtattccgtggtgaacatgtaccacattttctttatccagtctatcattgatggacatttaggttgaatccatgtctttgctattgtgaatagtgctgcagtgaacatacaaatgaatgtgtctttatactagaatgatttacattcctttgggtatatacccagtaatgggattgctgagttgattggtatttctgtctttaggttttgaagaatccccacacagtcttccacaatggctgaactaatatacactgccaccaacagtgtaacagtgttcctttttctccacaacctagccagggtctgttgtttttgactttttaataatagtcattctcactgatgtgagatgggtatctcattgtggtttcgatttgcatttccctaatgatcagtgatattgagctttttatcaaatgattgttggccacatgtatgtcctcttttgagaagtgtctgttcatgttctttgcccactttttaatggggttggtttttttcttgtaaatttgtttaagtttcttagagatgctagatattagacctttatcaaatgcatagtttgcaaacattttcttccattctgtaggttgttttattactctgttgatagtttattttgctgtgctagaagctctttagtttaattataccccgtcaatttttccttttgttgcaattgcttttggcatcttcatcatgaaatctttgcccatgtctatgtcctgaatgatattatctaggttgccttccagggtttttatacttttgggatttacatataagtctttcatccatcttgagttaatttttgtatacagtataaggaaggggtccactttcagtcttctgcatatggctagccagttatcccagcaccatttattgaatagggaatccttttcccattgcttatttttgtcaagtttgttgaagatcaggtagttatagatgtgcattcttatttctgagttcccaattctgctccattggtctatatgtctgctcttgtatcagtaccatgctgttttggttattgtagccctgtagcttttctgtgattttttccagatagtataaaatgtttaatttctatgatgcaaatactagggcgatcaatgctaaaacggttgtcctgtacaattttttcttaccataccaaaattttttcttatgactgtttattttaattattttaagagatctttattaacctaataagtattggatatgtaaaatttaaagataatatcttaataaaccaagattttaattttatttggatatatgcaggtttgttttgaaaggcaaattctgaaaaaacaggcattatattatttatgaaacaacttgaatactgatatatctatatcaccagtaattcttcctttgataactcagaagtttttatgaaagaggttcatttaatctttgttttctaaatacataggtgaaattatacttaaaaatgatacagctattcatgaaaaattcaaatatataacataaccaatagaagacaaattagccattggaagtacagctacaatatttttattcatattttatgtatgatttgatgaaggaaagatattctgattagaaaaaggagaataatattagaaatatgaataattcaccttacttatcaaatttttcttatgaccagtaaatgttttatcatgaatgaaagtcaaattagagagaaagccagtatgtgctaagaagtcacatataggtattccttaataaaaattactcttgtgactcaaggatcataaaatatgctgagatgtatgcataacttggctgtttaaaattagaacaaaaactgcatatccagtgttatggttaactggaaataagcacacatctaatttagtattccacatagccattagaattcccatggtacatggactgaatccagttaattgtcatagctttttctacatatgacagaacacagagaactggatctatgaaatcattaattgaattaccctttaaatgtgccaaaagatatattagtttttactcccttggtagtttccctcagcataaatcaaatgagaaaatttaaatgactgaaaaaaaagaacagtgagtgttacaggttattttaaatgtgcagttagaccttagttaatttaaggggccagctttttttttttttttttttttttttttttttttttttgagacagagttgcgctctgttgcccaggctggactgcagtggtgcaatcttggctcactgcaagctccgcctcccgggttcacgccattctcctgcctcagcctccagagtagctgggactacaggtgcccgccaccacacccgctaattttttgtatttttagtagagacggggtttcactgtgttagccaggatggtctcgatctcctgacctcgtgatcctcctgcctcggcctcccaaagtgctgggccagcttctttacaaaataattataaaggtctaagaaagacaatctattacaatagatataacactggattgaagtccaaatttctgtgtctttagaaatatcaaacaaatgtgggtgtatttctcatcttcttttaaatggagtgatgacatctggaatacatacttatcctggttttcattcatccattttactgttattgactgaatagctacttatattcaggtgctgtagaagaactgtgaggcaagtaacattgttctttccctcattgaatgtataaattaggctggctgggtgtggtggctcacacctgtaatcccaacactttggcaggccgaggtaggtggatcacctgaagtcaggagttcgagaccagcctgggcaacatggcgaaaccccatctctattaagaatacaaaaaaaattagctgggcctggtggcgcatgcctataatcccagctcttgggaggctgaggtaggagaatcacttgaacctgggaagcagaggtgacaatgagatgagatcacgccactgaactcctggcccacagccgggacagcagagcaagactttgtctcaaagaaaaaaaaagaaaaataatttttaaattagggagatagaacatacatgggtacattaaaatgaaatatatcaaaggtggttaggttttgaccatactgccaaaagcagtctacaaattcaatgcaattctcatcaaaataacaccataattcttcacagaattagaaaaaataattctaaaattcatatgggaccacaaaagagccctcatagccaaagcaatactaagcagagagaacacatctggaggcaacacattacccaacttcaaactatactataaggctatagtcaacaaaacagcatggattaaatagacacacagtccaatggaacaaaatagagaactcagaaacaaagccaaatacttacagccaactgatctttgacaaagcaaacaaaaacgtaaagtggggaaaggacacccaattcaacaaacggtactgggataattggcaagccacaagtagaagaatgagactggatcctcatctctcaccttaaacaaaaatcaactcaagatagatcaaagacttaaatctaagtcctgaaaccataaaaatcctagaagataacatgggaaaaatcctctagacattggcttaggcaaaaacttcatgaccaagaacctaaaagcaaatgcaacaaaaacaaagataaatagatgggacttaattaagttaaaaaatttctctacagaaaaagaaataatcggccagtaaacagacaacccacagagaggaagagaatcttcacaaactgtgcatccgacaaaggactaatatcaagaatctacaaggaacccaaatcagcaagaaaaaaaaaaaaataccatcaataagtgggctaaggacatgaacaggcaattctcaaagaagatatacaaatgggcaacaaatatatgtaaaattctcaacattactaatgatcaaggaaatgccaatcaaaaccacaatgtgatacaacctccctcctgaaagaatggccataatcaaaaaaataaaaatacaatagtgttagcacatacatggtgaaagtggaacacttttagactgctggtggggatgtagactagtaacactgtcatgggatctttacagtgtcactttgccagccagaaacttctgtggctggtagtacctctgcttgggttttgcttgcttccactgggctcattctgcccactcagctcatgctattggcctagatcccatacccgccaagggtgaaccaggtggggagtggtgaggggtgtatcagtgggcgagtgcagggtccagccactgggcccagccaggcacttcagctgctgtggtgggacaggcagctccaggtgccactccatgcaaggctgaaccaggtgtatctcaaggggcttccactgtgggcacaagcatctggaccaggggaatgcagtggtgcccgaaagctcagagacttcagggagtgaacagccccaaagatggtgttacatcacgccacagccctggcatggggagccccaaggtctaggctcccagaaggaccacagctcttctctccttctcattgcctgcaacgtggcaagtagggggcatgtttcagtcctgtttgtgttacagctctttcagtcccgccattctgcagatcctgagttcttgtctcatgtccaagaagaatgaggtatgcagacaagtggtgggttagcaaggaggaaagcagtttcattgagctacagaaaagctctcagtagaccctaagtgggtagctctatccactggcaggtcatcctgacatctgtccaactctggctgagtcggggttttatgggctcagagggaggaagtgctgattggtccatggttggccatgggtaggcctggaaaaagcaccagaagttatcactctgggccacgattccacccagaacttatagccctaactccaggcttcaggctctccttggcttgaaggtggaccctcagctttctgcccagaaggctgtctgcctcctgctgccatcaacatgttgtatatggcccccaggctgttcatgccaaggggtgcctataggcccctgctgagccacatttagtcttccctcagcctccctcctatgctcctaggtgcccaatgtccagagggggttgaggtagcaggggtctggtgtgtcagcacctccttgagtgtgcacacacctaggtgggatgggacggcacctgggctgggccacaactttgctccaaaatcggagcaggcaccaggaatggagagaggtcagggatgggagcaggcacttcccagcctttgggggaagggggagttcctcacctcctgagagcagagcgcgactgtgcggctgcacatgcaccagggagtgcagggctcccaccccacctactcggtaggaggcagggcttcttcctgttcctggcccctgccggctctgtggagtgcacaaacctggccagacctccccaactgcagctggcatcttcacagtggctgctccagatgggctgccactgccatcacaaccactatggaaaactgtgtggagattccttaaagaactaaaagtagatccactatttttccaacaatgccactactgggtcattatatgaaataaacacttgcacatgcatgtttatagcagcacaattagcaaatgcaaaaatatggaaccagcccaaatgtccattaatcaatgagtggataaagaaaatgtagtgtgtgcgtgaatactattcagccatatgaaggaacaaaataatggcatttgtagcagcctagttggatttggagaccattattctaagtgacgtaactcaggaatggaatgccaaacatcaaatgttcatactcataagtgggaactaagctatgaggatgcaaaggcataagaatgatacaatggactttggggactgaagggaaagggtgagagtagggtgagggataaaatattagacactgagtacagtgtatactgctcaggtgatgggtacaccaaaatcccacaaatcagcactaaataacttatccttagaaccaaacaccacctgttccccaaaaacctattgaaataaaaaattaaaattaaaaagaagaaaaaaggtgattaggcagattgagacagctagtacaaagcaccgaaagcacaaaagagttcgggatgattaaggtttaagaagaagagttaatttaaatgtatgcaaggtcacaaataagcctaggttattttatgtgaagctttgtaaagagtcataaaagtttggatttaaggagtgtgaataggatctttaaaaggttttaagcaggatagttacatttgcttaaagtagaaactggtaggtgagtaagtcagcaaggggcttctaaaactgaccaggtagtgactatgaactgggcaagagagctcatactaaatattgagagacatgaatgatatttctatatattgtgctttagtggtgagaaatcaatgacaaagcttttaaaattgacaccctattataaccaaatctaagttcagctgctcatcacttgaaagccaaacatgagagatgagagttggcaggaggaaaagcaggtttattctgagagccagcaaaccaagaaaatggtggactaaaatcccaaagtaccatattaagtcagtacaaatttcagcctctttttggttaagggcagggagggtgaagagatggggattaggatcaagaggtgaccaagggtggcagacatctgagtgtcagtgaggatccaatggggttggaaaattttgtctttggtcaagtcacaatgcttccataaatatttaatgagaaatatggttaatttgtacatacttttcctttaactccagaattcgttttgaaaattatgattgctgtccttgcgtattatgagcgttattaaattattctagcctccatgtaagaatggataaaggctccttaaacaaaaatggagttagttatgacagttcttttgctgtttcactgttacactattacatgtgaaaataactctttctgttatttgtagttcttaaaatataatattaaaaaggacatttgaaaattgtttgccacagagtattatgactggaaaagaggaagatatttcactctagtatgtgaatgctttgaagagtatgtaggacataatctacaatacaatcataatacagttttacaaggatgatgcctattcttattctcatcaatatgatttttaaaaacttatttttattataaattatttccctagtaatgccttttcaatttgatttagaaaatggattgtatatcgtgagttttatagtgagttacctggttctaatattcatgacctagtggaaattcaggtcaaagacttgtatatttcagttcccagagcctgtgttatgctttattatcagcttcaccctgctcagacacaggcagaattcagtaatgcaggccagcactgagcaagaaataagacttttcttaggtcacagttaccaaccacaaataaactaggctcagagaaaatatttcagagccaaaggaggaattacaaaagaaagtagaaagcttgcattaagcaagtaatcaagtcaagaaatctcatactgcaggagaatgcagtgatcagtactgactccaagttcacctctaaatctcagaataagaaaaaaaagaggcagggagggggcatttatcaaaacaagtataacttggtaccaagtccaaagacatgctttaaattgacaccctattatagtttctttggtgtctcctagtatggaaaggattgggctggaaataagcttgtcctgaatgaaacattgaggaaggtgacacattcagatgctggcatatgttactgtttcatgtgatgctggcaatgtaatgtcagagattcagtcaagggcatggatttaagaataaatgttctaggtcagacttctgcctgtacagctgccatttaattaaatctaaataatttatcattagggatcatttcattgtgataacagctaaaagagcatagttccttgtttttaatgtctgtagacacattacatcttgtttgcagtattccttttcttatggtctatatagtaatgcacaatttttattaattatatacttattaagaagattttggagtcttaagataatacatttaccaccaaggactactgcattatttaccctcatgtagtctctttttgtctgtttgaaagatattcacttattaaaatatttaccaaaaacttttttttttttttttgagatggagtcgcccaggctggagtgcactgatgcaatcttggctcactgcaacctccatctcctaggttcaagtgattctcatgcctcagcctcccaagtagcagggatcaaaggcaccttattgtacaaacatatgcgtatcaatgcctgcatttgtatgtagtaaactacaccagaggcttttataaacatgaaataattattatcccaagtggcttacatagttctttagaaaggcaaatgccaccttttatatggactagtgctactttatgtatcctaaaagtaatatgcatgtttattttttaaatttgtcccagggtaattttaaagaaatcttagaggttaaggaatttgggaagaatttatctagttcaactcctaaattctttaaagaaaagaaaaaaaggccaaacttaaaagcagaaactcaaggtcacatcttttctacttgacagagttggcactcaattttgattgcaagctcaatgctatttccaatacaaaattttgcttatgagcaccagccacaaattttattttgttttcatccactattctctgtgtgtatgtgtgtgcacatctccagacctttttaatttagttgtatatatttatgggtcacagtgtgatattttcatatatgtctaacagtgtggaatgtttaaattcttcacctcacaatactcagcctttttcgtggtgagaacatttgaaatgtactgtcttagcaatttttaaacacatgatacactaactgttgtcatcttattgggtaatacatctcaaaaacttacttctgttgtctaactgaatctttgaatcccttggccaacatctttctattcctcttaccaccataacctctggtaaccaccaacctactgtccttttctatgaatttgactgttttttattccacatgtataaattagattatgcagtatttgtgtttctgtgcctggtttatttcacttaagataacatcctccagattcattcatgtcattgaaaatgtcagaatttccttctattttcattttgtatatatactatgtgttttgtatccattcatctactgatgcacattttaatctgatttcatgtcttgactattgtgaataatgctgcaattaatataggagtatggatatcttttctacatactaattgaagttcctttggacatatactcacaagtaggataactggataatatggtaattgttgcaggaagtcagggaccctgaacagagggaccggctggagctgcagcagaggaaacaaattgtgaagatttcatggacatttatcacttccctaataatactcataatttcttatgcctgtcttactttaatctcttaatcctgttatcttcgtaagctgaggatgtaagtcacctcaggaccctgtgatgattgcgttaactgtacaaattgattgtaaaacatatgtgtttgaacaatatgaaatgagtgcaccttgaaaatgaacagaataacagcgattttagggaacaagggaagacaacagtaaggtctgactgcctgcagggttgggcaaaaacagccatatttttcttcttgcagaaagcctataaacggacatgcaagtaggagagatatggctaaattcttttcctagcaaggaatataatattaagaccctaggaaaagaattgcattcctggggggaggtctataaacggccactctgtgagtgtctatcctatgtggttgagataaggactgagataggccctggagtcctgcagtaccctcaggctgactaggattgggaaaccccagccctggtaaatttgaggtcagactggttctctgctctcaaaccctgttttctgttaagatgtttatcaagacaatacgtgcaatgctgaacatagacccttatcaggagtttctgattttgccctggtcctgtttcctcaaaagcatgtgatctttgctctgctttttgcctcttgaagcatgtgacctactccctgtttgtacactccctccccttttgaaatccctaataaaaacttgctggttttgtggctcaggtgggcatcatggacctaccgatatgagatgtcacccctagtggcccagctgtaaaattcctctctttgtactctttctctttatttctcagagtggctgacacttagggaaaatataaagaacctacactgaaatattgggggtgggttcccctgataggtagttccgtttttaattttttgagaaacctccatacagtttttcataatacatgtactaattgacattcccaccaaaagcatataagggttatcttttctctgcatccttgacaataattaccttctgggttttttgtaatagcctttgtaactgatgtgagtttatatcttcttatggctttaatttgcatcttcttaatgattagtgatgtggaacattttttaaaatacctgttggccacttatttaccttcttttgggctaattcagttcctttgcccattttaaaatcagattatgtgttttttttgctattgaattttctccagattcttgttgtaagacttgtgacaagttgtgagaagcactatgcctgggacattttaactgctcacaaaatagtagagatttaagttaatgttcttctgggaatctttctctgggttgcagttatataacaatatatttatttacttttgcatctgcctcatccactagaatgtttcctgttgagatgaataccttgcatttaaacagtaatttgcatgaaataaactaccagtgataatttgggacagtggttgccctcccagagctgcagatggaaaatctttaagattaaggttgagacattcatctttttcctccacaaactctcaatgtgccagttaatactcagggaagaaaaacttttatacccaaacagttgtgtccagcatctgctaaatggcttactattcatagacataaattttgatattattttgaattattagtgtacaatcaaatatatcattctgatttggaggattttaacattttatttggcaaggcaacccatgatggcagtatatcatgaagaagttaaattccttcaacatctttttgaaagtgaaggtagaataaatgtacaaataggtaaatattagtttgaaatcaaaacaaataaaaccaaaacataaataaaatgttaattattcaccatacgttatggagtatgattaattctaaacaagttattgtagcattgaaatatgtgaaaatatagaatgtatgagctctgtcattaaaatatgagttcaatttagaaatttaaataaaaataaagtcactatttaaggggtcaggcttaatatatggtatcataatactgttaaaatttaatatgaattttgccctctttatgataaaaataattgatgttgttttatgctttcaagtgtcttactacatatggagtgtcttgacatttttaaaaatggaaataaagcctctttcaattttaatttcaaataattatgcctctcaacaaataaaatagataactcaatatttcccctgatgtgaggcatacgtgtttactgtagagtgaatatatgtgtgtaaacaatatcaacatatgtcaatatattgtatgtatatgtgtacaatatggtttggctgtgtccccacccaaatctcatcttgaattgtagctcccataattcccacgtgttgtgggagggacccagcagagcataattgaatcacagggtagtgaataagtctcacgagagctgatggttttataaggggtttccccttttgcttggctctcattctgtcttgtctgcagccagggaagatgtgcctttcacttccccttctgccacgactgtgaggcctcaacagccaagtgaaactgcgagtttatgaaacttctttttcttcataaattacccagttttgaatgtctttatcagcaacatgaaaacgaactaatacagtatatatttgtgtatatgagtgtatatatgtatatatagtatgtatgtgtatataccgtatatcaatatatgtcagtatatctatatatacacaatatatgccattaaatgtatatttgtatacatgagagtgaatatgtatatattcatatgtgtgtttacacatacccactcgtatgtacatatatgtatatattcactcatatatacatatatacatatgtgcacacactttacagaagtgaaagtaaagttgcttttttacaaaagcaactttacaatagtaaagcctacataattatttgaaattaaaactctaagggtttttattttcatttttaaaaatttaaagagactccacatgtagtaacgcattttacatttttaaagccatacatatggctttccaaaagtttgtaactttaccgggactgaaaaacatcaaaattagaatacactattgaggaaagtacagtataacaaatatattattattatacttactatttttagactatcaagatatttttgcagtcatgtttagtatttttgttatttatttatggtataattactaacaagactcttttagtttttatgtttcagaatattgatttaatagaggctgaatattctcaatgaaaaaaatgtgaaaaaagcatacacaatatgcctactgccaaacacgttagtattaacaatgatgggagcattgtaatatattttaacctcttaatgcctcagcagagacttgggaagaggtaacaacctaatttcttcataaatgtcctaattgaaagttgattatagaacctaactttggcgaggtccagatgcatattcctgatgtaaaattatacagtaaaagtattttaaaataaaaagtataatttaaaaagtgtctttaaaatcaattattatatttgaagacgttagtaagtatacttatttgggtattctttcttgagatgtcaaatgacattttccattattttaggcaaatatgttttaatgcagaagtttacttgttatgatcaagggcaaaagttctatgaatcaatttatttgtaatttcttaatcacaactgtgctagggagacaattttgaaattcacctttgaaatccaaatcttgtctgtaaacaatattgcaacaaattttctacactagtttaacaatatttcttattaattcaaaatggaaggcattttaacatttctaaactacaatctagggaatcttctttgactttctgataatgaagcaagtgattaacttacctgcccattcataattttaaattaactgtagctttttattttaactctcatatttcaaatatacaaattttaccaaaagtaacccactatctcttattactgatgcatctgcttcacatctgtctctctcattctctctttaagaaagggaatcaagctttctttttaaacaccttcttggggttaccctcattcgtcaaacagaaattattccgagacctgttaaaaactgtaaggaagactagtcattattactaacacaatagtgctcaagactattgcaatagaagagagagattgagctcaaagccaaatacaaggacaagttggaatgtacagccaatgagtagagtgagagatggcagtggatgaaaagttattaagagggacctggtaaacttcagaggtaatgactttcttggtaacctggcctaacagggtccttgctaaagacaggccaaagacttagaccacaattgtgttgaatgaagaacttggtcagatagcaagagtgatcagaaatcaagggtgcgggaactcttataaatggatttggcaggattctttgctactggcaagccagggacagtgccaaggtcaaggcctagttgaaaagtgggctaagaagaacctgactaaagtttgatcaaagagggtgtctgtgtcactttcttgattgtcactggcactggaggctttcagaaaggagatctttttctccacctccagtgaatgacatacttccatcttttcactattcaaatttatcttaacttttttctactctgctcagataaaaattaattcttccaataaagtcacttcttttcattataatttgtagaatcatattttgatttggactttgataagattgatggacacataactccttaagatatgcttccataacttcatatttcatgtagtcaggaattaattgggcacaaatcctaagccaaaaaaatgcaagttcaagataaaaatgtttccatgcctattgccttttttctttcatatatatgtgaaagaatatagcataggcaaaagtatctttccacttctgcttatgctatattcttttctcctttttcccctgtatgtgtttctctaaccaccagtgtttatttcctctgtacatttgaaacctttcatgatgtaaagggccttcctgattttgaaaatgactatttttggtacaccaacatgacatatggctacattcttcagccacttcagatggtgctatgcaagagtcacatccctcataccacactggcccagtaccaagttgttaattgcattgacatgctaatcttgtgccagtgaatatcgctgccttgctactgtattgatatttacaaagcatatcctgtatagacatttagtttctgttttattatagaccggcgttatcaatattttcttgcttgataccacaaatacattttttaatgtggctttcagtatagcatgtattgcctgtagcaagtattgcattcaacactgataattctgagtaaaattcacactgagatcatcaggcaagcaattagtggcaattgctttctgttatggaaaacaacaaatcttaccctcagtatatagttaaattacactattaaaatacactacatgcagatgccacattgtggacagagtgtgactgcaagtcagctattaatgtttccattaggatgtatgaatttcttattggattgagtttatttgtaactatattttccttaaacctctccgtgaaatagtataatgttaaataagttatattttacataccttaacagttgtaaataaatttaaagatatagatatagacgtatgaatttcttgttggattgagtttatttgtaattatattttccttaatcctctccaagaaatagtataatgctaaataaattattttacataccttaagggttgtaaataaagatatagacgtaaacttagtttttgactttgaatatcaagaaatttggcttctcttatagttgttcctttaatcagttgtgtgttcttagattcttcatgtccctggctttttcaatttagttgaactgttgaattaaaatttatttgactatttaatttccagtcaattcaatgtacagtttaaaaaacactgtgtaagccattagataaataattgtgactgagatacattctgacccccaaatggacatcatttggtgtagaaacgatcaaatagatgcttccattgcctaatgaccatgatgagggaaatcacagaatgctgtgggtgcacaatttaggccacctcatctagaactgaagagtgtggaaaggctgtgtttagaaagtgaggagcttacttttgaactcagtcagttgaagggaagggcaggtatatgccgagctaatggaaagccataggcaaatgtatctgtgtaatatttagcacacctaagtacaaagatgtaccaccatttatgggatgttaagttgttttcagtttttgttattaaaataatagtgcattaaaagtcctttaaataaacttttataatatttataattattttctctggatacatactggattgcagaatcaagattataaagctgttttatcttcctgagaattgtttcaattatattccctttaataatagatgataggattcacagcaccaaaatgtttcaaaccctgaaaattataattttatttctgtatttgattgggcatataatagacgttggttaaaatagccctatattgatatctgagccctaaaacttattgtgggaatgagcttggcatctcttaactcagatcccttttccatagaacagagattattccttccttacaaggttattaaaaatattaaatataataaagtatataaacaacttaccttcatatagaaatgattcagtaagcatttcagacttgtatgtgagattgtcattaaaaacattcattaaagtaaaataggacaaggacttctaaatgattacttctgcatttgtactacagataagttacatatctgatatttatataattagtagatataacaaaactggatattgcttttttaagtagtttgcagtaataaaatatttaaaagttaaatgacttaaattgataatttttgatgtgatattaagttctaagtagttaatattagtaacaataatcagcataaatatgagcaaaattttagctacagcttacttgagaattatgctttcatgtaaaaataattataaaatcttctcaaataattatgcaggcaggaaattgagaggttacaatatttggcatttgatttagatcgtagtcctggggtggaggaagagtgaaaacaacatttgtatgttttcacatttagatttttaaataaaattatacattgttttctcttaacttctgtgatagagatctagaatacagacctgaaaaaattgatagggaatcgtaagaataggaactggttacttttcaaattaattattgttgattaatttatgacatctgtggtttagtaaaaatgggaaatatggatactttagggaaaaaatgtttagttatgttgttgccattccagcttagatttcatacctgagtcttcaaaataatttatagaaaaagtgactatgacttaaacgaaataaaaagtgaggaaagaaccatttattagattttatcctaaactctcactttatagtttgttccagaaatagtttctacacaagtagatagtcattaacatagtcaatatgtattttttgtcagattagtaagagcaaatttaactctggttctcttatattttaataattggtaatttatgagtgtatgttaatcctattaaattatgtgataaaagtattcaaatgacatatattttcgtgagttctgatgcactgtgttaaatacacaaaattaggctgggagcggtggctcacgcctgtaattccagcactttgggagtctgaggcgggcggatctcgaggtcaggagatcgagaatcacgaggtcaggagatcgagaccatcctggctaacacagtgaaaccccgtctctactaaaaatacaaaagattagcctggcttggtggcgggcacctgtagtcccagctactcagaaggctgaagcaggagaatggcatcaacccaggaggcggagcttgcagtgagcggagattgcaccactgcactccagcctgggcgacagggcgagactccgtctcaaaaagaaaaaaaaaaaatacacgaaattagaattatgtggcttctttttatacagtagaaataactaatgcttatactacttaaatgattatttaacttaaagaaaatgcctataattattttattatattgtattacagatgcccccaagtttatatcaaaccaaacaatttattactcttgggaaggaaatcctatcaatataagttgtgatgtgaaatcgaatccaccagcatcaattcactggagaagagataaattagtcttacctgctaaaaacacgaccaatttaaagacttatagtacaggaagaaagatgatattagaggtaagtccacatgtatacatcaataaattgtattattttaacaactatctactatttcagaatatatttaaatatcttcatatgcatatatatatataataagagagagaaatcatggtgtatatattttacagttatttacttaaaggtccatggctcattaatgatgagtgtatgaatgtctattcacttatatagcaatgtggctatatagcaaagaccattatttttataaatgcacttttaggaataaaaacaattatatggccgggcgcagtggctcactcctgtaatcccagcactttgggaggctgaggagggcagatcacaaggtcaggagactgagaccgtcctggccaacatggtgaaaccctgtctctactaaaaatacaaaaattagctgggtgtggtggtgtgtgcctatagccccagctactcaggaggctgaggcaggagaatcacttgaacttgggaggtggaggttgcagtgagccgagatcacgccactgcactccagcctggtgacagagcgagactccgtcttaaaaaaaaaaatatatatatatatatacacacatatatatatgtgtgtgtatatatatatatatacacacacatatatatatgtgtgtatatatatacatatatatgtatatatatatacacatatatatgtatatatatatacatatatatatggaaaatctaggaagaaaaaattggtaatgtaatagttattgagggataaaaatttttccatatatatatatatggaaaaatctaggaagaaaaaattggtaatgtaatagttattgagggctaaaaatttgtcttcaatgttgatgttttcattgattccatgtggtatagcttttttttcttttcagtctggcaggtataaatgctatctgttggctagatttttacaattctagtgtaaattccaaaataaatgaaatttacttgttcagtatcttttgttttattactaaaaataagattttgtataattatttttatattgccaagtaattggcctttaaatactgtctgaataaagtgcctcttatttattaattggagtgtatgtgtgtatcaatttccgaaacataaaaaaatctatgaaaatgatcatcaccctttccaaattatgatgcggttaggaaaattgggaatctttttcacacagccttatttgctgaaaggttgctacattttattcactaattcagtttgcataagctaaaatgaaatgcacgttttagaataccgtctaatatccatactgccttaacttaaaatgtcctcattgatgccatttagactttaaaaaaattcgtttgataggaggatttagccatcatgtctgcaaatacttgcatagctggctggttggtaattaaaccgctatgtctaaatcaatttcaatataaataagtttctttggaaatattttagaagaattagctatttgtgacttgacagggatgtcaatttcataaaaacatctggacagttttaatctaaattttatgtgttttaccttagtgaaaagctcaggttagatttaacttgttttgtgtagtgtgtagtctccttgaatactttaataaaatactatagacaggatggttgaaatcacagaaatttgttctgagttctggaggatagaggttcaatatcatggtgcctgccaggttgctttctatagaggactcttccctggacttgtacttggccgccttcttgctgtgtcctcacatgccctttcctctgtgcgcacacagagttctggtgtcttccttttcttgtaaggataccagtcctgttggattaggtcccactcttattacctcgtttaaccttaattaccttcttaaagatcctatctccaaattcattcacaccggaatttagggtttcagtatatgaatgggcagagtgaggaggcgggcagttcagtccatagaaagtagattgaatttcgtgagtaaatgacagactaatgtgtaatttctgctttacttcatcttgacattttttagttcctcagccaactcataattctctatatttaatgtgaagggacattttatacatacaacatagtatatagtgtatgctatttaaacttctgcctaaagacatccctctgcactccaaaataaaattttaaaaaacccacaatttttgcctacttgacacacagccaggtgatctgttggctaaaccactgactttaaacagacatgtttatgtgtatactctcacaaattaaatttaaattctgaatgaaaaatataaatgtgtgattaacacaacttgaaaacatagcataacaaaataacaataatataaagagaaagcaacaatgagcattactaatatttaattattagtatatacagttgcttgagacagttacttttgtttagtaattattgtaaaagtcatatatgtgctaattctttagaatataaaaggaaatataggaaaagtttacacttaacaagttgtcagtaataaatttattgaattgttttaaagattttttctttaagtatatatattcaaacttttaaaattgtgtgttttaaaacataaccaaatattcaataaattatttaagttactgccaataaatgcctctgtaatctgtaaaggtcaaggtcatcaaaactttatttttttaactgaccacatcctgaggaaattacaaaacttttcaatatgtgggcaaacattgaaagaaggattggttttaataggtttgttagaataatattgtgctttgcattgtctgtatctttgtttcatatcctaaataggggtgcttactgttgtgtccatgactttcttatcatggaatacatagaagaaataaatatttttaggtttaagaaaaagactagcaagcttcttgattaatattatacacttagcttatatttagatattcaaaactatatttgttagttcactatactctgtccaaacctaatatcattaattaatatcagcatttttagctggatacagatataccttggagatattgcaggtttagttccaagagcacctcaataaagtaaatatctctataaagccagtcacacaaatttttgcttttttcagtgcatataaaagttatgttggcactatagtctattaagtgtgcaaaagcatgatgtataaaaaggtctacataacataactgaaaaataattactaaaattttctgggaataatttgagatttaagcaagttgtaacttttttcattggtgaagcgttttgtcgcaaggttgatggctgcttactgatcagaatgttgattgctgaaggttggagtggctgtggcagtttattaaaataaggcaacagtgaagcactttgttaattaacacttcctttcatgaaagatctctgtgtagcaggtgatgctataaggctaacagcatataatactgtttgttaggaattacctatagcagaacatctttcaaaaatgaagtaaatcctctcaaaccctgtcaccgctttatcaactaagtttatgtaatattctaaatctttggttatcatttcaacatttttcaggcatcttcagcaggagtaaattctaccaccagaaaccactttatttgctcctccatgaagagcaattttcccatctgttagagttttatcatcagattgcagcaattcattcacttcttcaggctccatttctaattctagctctctatttccaccgcatctgcagttacttccttcactgaagtcttgaacccctcaaagtcatccatgagggttggaatcaacttcttccaaattcttattaatgttgatattttcactttctcccatgagccacaaatattcttaatggcgtcagcatggtgaatccttttcagaagattttcagttgacttttcccagatccgtcagaggaatcactgttttatggcagctgaagccttaaatattgtatttctgttttttgttgtgtgtttttttttttttttgagagggagtctcgctctgtcgcccaggctggagtgcaatggcacgatctccactcactgcacctccgcttcccgggttcacaccattctcctgcctcaccctcccgagtagctgggattacaggtgcctgccaccacgcccggctatttttttgtatttttagttgagacggagtttcacggtgttaaccaggatggtctccatctcctgacctcgtgatccgcctgcctcggcctcccaaagtgctgggattacaggcgtgagccaccgcgcccggccacaaattgtatttcttaagtactaggacttgaaagttgaaattactccttgatccacaggcttcagaatggatgttgggttagccagcatgaaaacaacattaatatctttgtatatgtctatcagagctcttgggtgactaggtacattgtcaatgagcacgactagtttgaagggaatcttttttttttttttctcagcactatatctcaacagtgggcttaaaatattcaataaaccaggctgtaaacagatgttctgtcaaccaggcttagttttcccatggatagaacacaggcagagtcgatttagcataattcttaaagaccctaggattttcataacgataaatgaatgaacaatggcttgaacttaagtcactagctgtattggcccctaacaagagattcaacaggtccttggaagtttgaaccctgccctttacatctcctctctagctataaaagtctagatggcatcttcttgcaatagaaaactgtttcatctactttaaattctattttttagtgtagtcaattccatcaatgatcttagcttgatcttttttttttttttttttttttttttgagacagggtcttgctctgtcgcccaggctgtgtagtggcgcgatctcggctcagtgcaagctctgcctcccgggttcacaccgttctcctgcctcagcctcccgagtagctgggactacaggcgccggccaccacgcccggctaattttttgtacttttagtagagacagggtttcaccgtgttagccaggatgatctcgatctcctgacctcgtgatctgcccgcctcggcctcccaaagtggtgggattacaggcgtgagccacctcgcccggcccttagcttgatcttctggataacatgctgcagcttctacatcagcacttgctgctccaccttgtatttttatgttataaagatggcttcttcccttaagcctcatgaactaacccctgccagcttcaaactcttcttctgcaccttcctcacctctgtcagccttcattgaattgaggcatgttagatctttgctctggcttgggctttggcttaagggagtattgtggttggctttgtcttctatccaggccaacaaaatatttctccataacatgagtaaggctgtttagctttcttatcatttgtgagtccactagcgtagtactttagatttttttcaggaactctctcttcacatttaccacttggctgtttgttgcaataggcttctgttttagcctatcttggttttgtcatgccttcctcactaagcttcatcatgtttagcttttgatttaatatgggagatgtgtgactcttcctttaacatgaacacctagagaccattgtaggattatgatttggcctaattttaatattattgtgtctcacagaataaggaagccaaagagggagagagatgagggtacggccagtcagtggagcaatcagaacacacatttatcaattaagttcactgtcttaggggcacagtttgtggttctccaaaacagttacaatagtaccatcaaagattactgatcacagatcaccatagcaaatttaataataatgcaaagtttaaaatattgagagaattaccaaaaagtcagagagacaggacatgggcaactgttgttgaaaaaatggtgctgttagattgcttaatgcaggattgctacaaaccttcaatttgtgaaaaaaaaaaagaaaagaaaaaagaaaaacactatctttcaagcatggcaaagtaagacacaataaaacaggtatgcctatatttaaatatgaagaaatagttttatcagtagatgtttctagtagatgtttatcagtgggtgtttatcagtagatgtttcttgattaatattttcaatgctttgcacattttaaacatttaaatatttttacttaatggtctataatataccctcgttatattatcttatattttcataaaattatataacatttcattgtgctgggtttaagtgtaaaaccactattggactttagttttatgttgctttcctagaatacatcaaataagcttcagggtacatgatttggccagattatatctagagcatgtgtgtggatgtgtgtgtgtgtgtcttaatctatgtcgtgatgggtgttttctttatttattaagcatacaacatgataaaaggttgcttatttaagatgaacttttatctgttgatagctgaactcccaggaacaacaacaaaaaaatgaattgagcttttaagaaattgttccaatgaaaatggctctatttaaattattaatcttaaggagctgtgtaatagtcacatttctttgttgtggctatcctgtcttggcattatattgattcaataaacacattcttctctgttgaatttgcaaataactttctcatatgcatgtagaataagaattttttgttaaatctctttctcattagaacaattagtttagagttaaattagccttgcttattaaaagctacacataaggaaaatgaatattttaatcacttagcagtaattatgtaagagctgttacaaattctaagcttattcctatgatctgtttctagatggacagctgactagaaaacgaatgacacagcttttctgtactctttcagaattatcatcttcaatgggcctcaaaattgcactcttagttaatagcctcccattactacaaaatcatttttccctcttttgggatagagttgaaattaacagcaactcttgtaggcatattctctcttaataatagttacagagattgaaaattatatctattactatcatcaaatctcttatctaaattgatacttcagaatttctgtacattagaattacagggtttgtctcagtgttcaccaatagaatccccgaaggttaacttaattatggatttcaaatgtttaaggatagaggtcagctattttctacctagagtgaaaaagaatggtaggaattgaacagaaatggaagcaagatactgttattagatagcgagaaaaagtgcctgtctatgagtattgttgcaaagagtaacattttattgcacagtatgttcctggaaagatttcattaagaatgatccttcctccttcgttagtattatatgttcaataaactcaaaacagggagagaaatatcacatatctggagactttgttgaacattaaagcaaactgatctgaggccaaaacataaaaaacagttaacaatgcttttattacaagcttcctgttttcaagtttacacctacattgattgcaaactatagatacatatatatatacatgtatacataaatatatacacatatatatttcaaactgtgtactactttctgagctttacatatatgtagatataatggttatgctatttaatagatacatcgaagtggtgccatttgtttacttaatgaattaatagataaattctgatttgcctagtcctgtggatattacgggctcatggatacatcataaaaggatttatattatttagtaatgcttacttaataaagaaaattaaaaatatatggtaaggagttgttgggtaaaaaatgaaatgtgtgaaagtggtagtcatactggggtttattataaaacttctgtgatgttttagaattgtaacatttgttattataattatttcagattgcacctacatctgacaatgactttggacgctataattgcacagccactaatcatataggaacaagatttcaagaatatattcttgctttggctggtaagtatagcacaataatttttgagatcgcacacaatatttctgagagcaaatgaaaatttaagttgataaagtggtctcatttacatgtgggatttaaaacaatggatctcttggagatatcaggtagactgtggttaccagaggcttggtagtatattgggaaggagggaatgaagaggggttactcagggagcataaaactacagttgattacaaagaataagatatgctgttcagtggtacggtagggctataatagttcacaataagttattgcatatttcaaagtagaagaatatatttggaatgctccaagcacaaagaaatgacaattgtatgaaagaacagacatgccagttactcagatttgatcattatatattgtctgcttatattaaatagtcacatgttccctgtaaatatgtacaacaattttgcatgcataaaaattttccaaaaccttagactttagcgtgtctataacaaaaatatgaacttccaaaaagtgggtgtcatgtaattttaaatgttagcaaagaatatattttacatttttataggtaacaatacagattgctttttataaagaatgaatcacttttaaaaacttcaaaccattgtatctgctatacagtgagcatgtacaatgtatttactcatcaggattgattttaaaacctgattctaatccctccaacttaaaagtgagatatttgtgaaagaaatagggaactttttttttttttttttttttggatgttaggaacggtcatggttttttttttcgatttttttttattattatactttaagttttagggtacatgtacacaatttgcaggttagttacatatgtatacacgtgccatgctggtgtgctgcacccattaactcgtcatttagcattaggtatatctcctaatgctatccctcctccctccccccaccccacaatagtccctggagtgtgatgctccccttcctgtgtccatgtgttctcattgttcagttcccacctatgagtgagaacaggcggtgtttggttttttgtccttgtgatagtttgctgagaatgatggtttccagtttcatccatgtccctacagaggacatgaactcttcattttttatggctgcatagtattccatggtgtatatgtgccacattttcttaatccagtctatcattgctggacacttgggttggttccaagtctttgctattgtgaatagtgccgcgataaacatacgcgtgcatgtgtctttatagcagcatgatttataatcctttgggtatatacccagtaatgggatggctgggtcaaatggtatttctagttctagatccctgaggaatcgtcacactgacttccacaatggttgaactagtttacagtcccaccaacagtgtaaaagtgttcctatttctccacatcctctccagcacctgttgtttcctgacttttaaaaaattaaattatatttcaagtaaagagagaatcctgatgaaaaaattaaaaagcaaaacactctgagaaaaaatgaactataataatatattttaaacttttagacttgaaagtacaaagagctatcttacttctgaaggaaaatagaaaattgaaggttacataaatttgttgaaaatattttattttgtatgtatatgttaatattctagttttacctctaaaacttaaagatatagaaataacaacatatagaataaaaaattcatacaaaccagaaagccagatattgtttacttatttataaaatttgccattatgttttacaagactgataaggaatcctaaaatacattttaaaaaatagtttatgtagctcaaatggaaaaaatgtgatttacagtcttctaagactaggtaaagtaatatcagaaaattattgtaatattatattttaacagacttaaaagcatctgtaaagaaattttataaccttttcaggtagagattttatttataactttaattttatattaagttcagaaaaatgttcatttttactgctgtataaatatattctaaatattaatgtcattgatcgtaaaggccaagaagggaaatttttaagctaataatgtcaaattattatgtaacttagagaacctgctattctccaattcaggttttactgcattgatagagaagggagaaaagagattacatggaaggaattgatggaagaaggcagggagaaaaaaaatcaagataagtgagtttagaaatgtgaagagactgttatacaagcaaattaaattataagaaaatgaagtgtgctaattctcaccaaaatgcatagataataaattgaagaatcaactgtactaataagaaacattcactactcaaattaattccaagcctttggaaattatgcaacttttctttaaattagtatataattttataaataattagatataggatcaatatatgtatatataatgttattaatattgatccagtattgtatattgccatttcgtaaatgatgtgtttttcgattaggtacaacttaataaatgaccagaatttttaggagggtgtattaatatttggtatttaaaacattatgttgattaggtttaaataattccatgaacttcacaggtagtatttaatgtgcatgtacctttgtatctcacaatacttactgcaatattgttcattgaaaaatatatttgattcctatccttctagtgactatattaaattactgagttttcttctgtccaaacataataaaaattaaagttttcatcaaagctgagttagaaaatattggaaattttttgaatatttttcagcaattttcctaatattccaaattttatcaattccaggctaagaatttgttttagaaaaaggtggattcagttgaaattgtaatgaagatataaaaatgattcagacagtcagccttagatgggaaacatgcatttaaatatcaacatttataaatatgctttattttatggtactcttatttaatactaatatttggtagaaaacaatctgtcctgcagaatcctaacactgaaactatactgtgattttaaataagatgtaagacatttattatataaaaaattaaatatttcctaatatatgaggataccacagtttaagatttcattggcctatttgccttgtaaaaggtcaagatcatttggcatatggtattttacagtgtaagagaataccttacttccaaagggaattaattagagccaaaatgtagtgtgaaatttttgtacacattcagtggtaatataggaaacaattactttttcagcattcagaaacattttttccttttttcctcccatttgtcctcctttccttcttttttccttgcattttccctttttaataacttagccctacatcggaatgaggtaggcatctgtgtaggagtagggtgaagcacagaagcctggcatgggatgtgaaagcctgagcagagtgaatggagtggaaggagtgttgcaggggtccagtgttgagtgttgggatccagagagggtaaaaagagtgcccacttgccaagacagaaacagcaacccaaacaggcttgttggaggccattcacctaagtgaaacaactcaaaaacagaaattcaaatactgcatgttctcacttgtaagtgggagcttaacagtgtgtacacacatggaaaaatagacactggagactcccaaaggtgggaggctgggagagaggggaagattgaaacattacttgttggatgcaatgttcaatattctagtgatggatacactaaaagcccaaactttgctagtacataatatgtgattgtaagaaaaccccctacacctataaaaataatataaaaatgaaatatttttgaaatggaagtaaaatgtatatgtgtttggtttaagtcagttaaccctaagcaaggactttccattaaaccctgacttcctattaatgagcaggagttgacgtagtcttcttttacctatctcctctgtttttagaacattggggggaaaaagtaatctttctatgttgttacagaaatatgaaatatttcacatatgtgcttgataattttgttttcttaacttttaatccaaatattaactagaaatataagacagacaaatacgtatatattttaagacttcaccataaagttggtttttaaaatgtacctcctaggtgttgatcctgctttctagtaggaagcattctctatttggattgaagtacatatcttgaatcaaattaaagttgtacagcatgtaaggctaaataaaagtttgactatatagtgttatttcttccttacaattttctacttccaaaagatgattatctgacaaggcattctgtatatttatatgcatatttattatttcttttcttaaaaaatcattaccctacattttaaatattattatcaagtaatttcatttatatatttttaaatttcttaatttgtttcatcattgttatatttttaactgttgaacttttttatattaaaccttaaccctaaataaaataatcacacctttgtttcattaattgatgcaggtttctgataaagtcaccttctcttgggcaattttatgggagggacttggctgttagctgtcatcaggtagtatgtccagcccctggggaatgagagcctcagctctttaagagtttctgtgcagtcattccaagaggtacctggtaacagtattgtgacaactaagtgagttaatgcattcaagcacccagcacatgacaagtactcaacaaatattaggtaggtattattatggcctaattatagttcatattggtcacttttcttttggatagaagtcagtaccttgatacctctttagttattatacatcaatctagacatcaaggaccaaggcttagtaaaatgagataatgaccttacttattctgaacattatacttctattaaataatgttaaattcatttgacttttgttatttttttccatttaggagcttgtactaccaattttttacacaaactgctattaagggaggtctctgatactgtgcttcacaattgattttttttaacctcagttcaggactctatacttacccctattaaatctcatcttgtcagttttgactcattttttaacctactgaaaccctgtcaaattcaatattttagctctttttttcaggattgatttaagtcacaagtacaatatcatgaagcactcatctgtattttcaccagagtcaggattagcctgtataagtcatccttgagaacagagattggcttacaggttaaactggatcaattgaatagaattctaagatatggaattatggccgatctactggtctgtgtacctagattttatcttagccagacctttgctccataacacttgaaagcatgttaaaattagttcatttggtatcacactttcttcacctaaatataacggcaggattctttaacataatcagttttatgatctagcctggacaagtctacatcttgatttttcaaagaactcattaagcaaacagtgatattcagaaactattcataatatattcttggttttctcattctcatattgctatgaaggaaaggaaatcaggataacttgacattattttcagagaatccatgtttgcatcaattcctaatcactttttaattcattcactcaaaaaatataatgaatttctagtaggtaccacacattgttctagatcttgggaatctgaaggtaaataatacatggcatctggtctttacacataagttggagttcaaaagatataaggttgctgtagaagtgtgaatcaaaggtttgggagaacaaaaatgaattctgattggagttcttggaaaaggctttcaaaaggtgtcaacttttgaattgagtctgaaagagggagtagaaacaggtccagggaagatgaaagggaaagactcaaagaaacatcaaggttacacttgtacataggcactatgctctgaaaggatgggactgttaatgagtaaggcatttaatggaagactggaagggtatattgtatgagaagaccagtgttggtaatgtgcttagagaggtagagagaagttaagttatagatcttaaaaacattcatcatgtttgcagggcaaggtggtttacgcctgtaataccagcactttgggaagccgaggcgggtggatcatctaaggtcaggagtctgagaccagcctggccaacatggtgaaaccccatctctactagaaatacaaaaaaatattagccgggtgtggtgatgggtgcctgtaatcccagctactcgggaggctgaggcaggagaattgcttgaatccaggaggcggaagttgcagtgagctgagatcacaccattacactctagcctgggcgacaaaagcgggactcttcctcctccaaaaaaaaaaaaaaaaaaaaaaaaaaaattcatcatgtttacattctgtctggtatacaacgagggaaatttggagatttttattcataaagcaacatgattcatgtatcttagaaaattatcttggtggtgttctagagacagatttcaacatagaataaaatgtacgtatgtaactaacctgcacgttgtgtacatgtaccctaaaatttaaagtataataaaaaaaagtgacacaactgccaatttccaaatttctccaaatatctaaaatatataaatttaaactcaaacactctaatgttcactcttcaaaatttttttctggctcataatagctctaaattgaatgtttgaatggttcattgtgttatatttgatttgcttatgacccattgttgaaatgcccagtactaaagataagtgaatctgggtgtccgtgagttgtgagaagagtcaagacatactcatatttggaggaaataatttccattgatatcttggtagtgaatgaacactgctatggagaatattagaggtaaaaatgggaaaaccaaggtcagatctctggacaacttcagtttaattcatggatgtataagaacaaaaaaaaaatgaaagaaatttttcagggagatagtgtatctattttgaaggataaatgtaaatataattggtcaaatattgtgaaaaagtctaaataataatttggatttggcaattggtaaaaactaggtgagtagtgaaatgagaaggaatttacagcatttcagatgtattgcaggttggctatataatattagattaagctcacaatgtttcttgctctattctggatgctatagcaaaatatattagactctgtaatgtattaccaacataaatatattgcttacagttctaggggctgggaaattcaagatcaaggcaccatcagatttggtttttggtgtaggtccaataaccaaattgtttttatagatggtgccttctgtgtgtccttatatggtgaaaggggcaaacatacttcattcagcctcttttatggaggcactaatcttattctcgagggtggatgtctcatgactttatcacatcccaaaagaccccacctcttaataatatattcaacatataaaatgtggagggaaaccagcattcaaaccacagcatgatcgaaacaagaaaaatgtatataaaaccttatagaagtaaggtagccactcaaaacagaaatagatagaacctatctcagcatagaagtccttgagttgtaagcaattatggtgacactgcatgtaacagtgttactggatctaggaaattcagttacttatgttccaattcttttagtatttgagacttttaccagatagaaattgatgaggaaatcaagcagaaactgatttatgataaagaacaagctggttatgaaatcactggaaaggcagagaaaagaccaaagacagccaccaatattctaccttcaaggtcacaaaatagcataagcgtggtccacatgtgaagtctgcaatgactaactagaggtcaggaagccctcctgccaagttacccctcagctaataatcacagccacaccactcctgaaactggatgaataggctgtggaatggggagttcggatgctactctcattcatatctgcagagcctcttgtccatgcgcacctcctgagaaaagtgggactgacattcacacccctccagcattctaaactgtatacatgtacctttcattctaggttcactacatgaaacttagaaccatagcagcaagtcagtctaggaaatgaagattttagcctgcaatttcttatgataaacaggagtgtcttaaatcgtataatttgactctgagtgttaatagaaaaatatctaggatagggtttaaaacaccattctgaaataatattcatgctagcacttccttttaaaagagagtttacaaaaatcaaactcttcagattcctggatctaagtttagcaacaccacagcctcatatgtgtaaaaagagcacagttagtgtctatgaactatgcgtgctgggagagcaaattctcagaaataaagatgttggggcagaaattagaaataatctattgaaacagagtaacaaagaacaaaagaagagtatgtttcctgagaagagagtgggattgaaaacaaaaaaaagagatctttataattcacagtaataagactgagaagaaagaataaaattccaaagaagaagaaacaggaaaagagctatctgataaagaaaaattttggagaagacaaaaggaaaagacatgtcattcagagatgaagggtttagtcttggaaaataagaagatagagttccattatcagttaatcaagacgtgatagctgtccaagacattggttacattgaagcattactcacaatagccaagatagccaagatataaagatgtacagcatgatctcacttatatgtggaattctaaaacagtgaaagtcatagaaacagagaaaagtggtagttgccaggggctggggagtgggagaaatgggaagatgttggacaaagattaaaaagtttcagttatgcaagatgaatagcttctgggagtttaataaacacaagttcattcagtgactccagagattgtatccatctgactcctaggtcatggcaccaactccttgccattacacacctcaaaaaattctgagctgaacatcgatattgtatccattacctgccatttgactaaaacattgatacatgtcaatggatacaaaagtatgtaatagaaggaggctgatgatcagggagggatagaaaaattacaatgactgacatttgctaagagttttaacgtattctagggtttaagtgctcaacattacttgatatttccaacaacactcgccgtcgtactattctaatctccatttgagagagaaaactactgcgatgtgaaaagattaagtgctgtagttgacaaaagtggcaaggccaggtcttgaatccatggactctcatgacatatccagtctcttaatccagcactttgccagcactgttagaggtgaagagaaagggtaattaaacaaataagtatttgcacaattgcttttctattcatttattcattcattgagtggtgaatggtattcatcaatttttgggatataagacactagaaaatagtttagaaaaatatggtaacaatgaaggaataatagtgtgtaaaactgagcatccgatatgagcctcagttgaaatattgggctgtgtctgaaagtcttttagagtagaccagtatctttgcatacacccagtgcattagataatccaggatcctgaacatgaggctgaaaagatcgagactaatgttgtaatgaaaatgaagctcctgaataccattgcagggaagtgatgtgatcagagtggttctttacaaagattgattttgcatttgcatgcctcgtgcattgatgtttttgttagacatccaatagaaaaggaagccaagagccactaatggcatcacaggaaaagtcagatagggccagggcttgggaggtaacagaggaaatgggaaggaagaaatagatacaagaattataatgcaggaattattaaaatagtgttttgactgattgtgatgtataagatagataggaatcaagggtgaagacaattacagattacagaaaaatccagaaagtgaagagaagaattagagatgttgattctaggcacatctgacactattcacttagatatgttctgtatctttgtatataatttttcattactgaaatatttaattcatcaagtatttcctgagaacttactatattccagtcactttgttctatgttacatgtatctatctgtatgcatgtataaatacatgtgtgcgaatgtgtgtttgtaaagtgttttatctctttcctcaagaaacttacaatttagtagtcagttgacagttggacttataaaaccaaaatgtaaaaaatatttagaaagagaatgaaagtcataagcatgcttttgctttaaaagaagtaatagaaataagaggccagtggaaaataatatgaaaaaaaggctacagtaagtgtcagcagatctgaaaacggactatataactagaagagactaggcactggcccatgttttgatgatggtggctttgtgctgaaagaaaaaacaaaggctcttctttctctgcaggtgcaccatgtcagggtgcacagttggtgaatggtgcaacctctgcagtcagagtaaaaacaaacaatcatgtttataccatatattcaaagatggaagcccaagaggatagataatatctccctctcatcccccagaatatactaccttcacttttgacacatgtccccaaactggagtgtaatgcctatgacatccaacttagacctaatgtacattagggagtcagccactcagcacagattgaagaattggcattttttaaggggatccgtgtgcatttgtttgcctttctcctatactttggatcaaacttataagtaaattttggatcaaacctacagctgaaaagacatgcagattaacctggagattaaggaaacatgaaaattattagaatatttgaaggccaaaacattatttagatatcttaaaatttgtatttccagatatgattttaatagttctaagacttttggatgcatcagaattctacacgtgtgtttgaaccttagagttgtaacatcatgtacttcataggctctctaaataattcacagtttctaattagagttgaaatatacactgtggcatttctttacagtattcacatgtgaaaggccgtaaagctgtgctcctggctcttgctcagtactatttataaggcatatttttatatgacctacagtgaccttttttaactctagcaaaaagagtacatttgacttttgactgccatatgagattttttatttgtatttatttatttttgagatagagtctctctctgttgcccaggctggatttgcagggacatgatctcaactcactgcaacttctacctcctgggttcaaccaattctcctgcttcagcctcccaagcagctggaatcacaggcacactccactacacccggctgttttttttatttttgtggaaacagggtttcaccatgttgaccaggctggtctcaaactcctgacctcaagtaatccgcccacctcagcttccaaagtgcagtgattacagttgtaagccatcatgcccagccccaattttatgtaaatgactgatataagaattgaaattcacatgtactgcatatttatcagtcaagtttatatatattagcccattctcacactgctatgaagaaatatctgagactggataatttataaaggacagaaatttaattgactcacagttctgcattcctggggaggcctcaggaaacttacaattatgctgaaaggcaaaggagaagcaggcaccttcacagggcggcagaacagagtgagtgccagcaggggaaatgccagacctttataaaaacgggaagagccagaccatttataaaacaatcttatctcatgagacttattcattatcatgagaacagcatggagaaaccgcccccatgattcagttacctccacttggttccacccttgacacatggggattatgggaattaaaaatcaaggtgaggccaggcactgtggctcactcctgtaatcccagcactttgggaggccaaggtgggcagatcacgaggttaaaagattgagaccatcctggccaacatggtgaaaccctatctctactaaaaatacaaaaattagctgggcgtggtggtgcgcacctgtagtcccagctactctggaggctgaagcaggagaatggcatgaacccaggggaggctgaggttgcagtgagctgagatcacgccactgcactccagcctggccagaaaacgaaactccgtctcaaaaaaaaaaaaaaaaaaaaaaaaattcaaggtgagatttgtgtggggacacagagccaaaccatataatatatgtttgtgtgtgtgtgtgtgtgtgtgtatacatatatatatattccctctctgaaaaaaaattatttttttatccaaagtttaagattatttcagatgtgataggaacaaaagaggaagagattcatagagaaattaatgttaatgtgtctctaaatcttgatgtttctggagtagagttttcaaaaatccctcactgggattttttttttttctagttctgcgtgctctgcctttgagataattcttccgaaataattttttatattagacactaaattaaatgtccacctaagataccttattgaacttgaaataatttaagtagtggatggattaaaataaaacacacaagaagaattttatagctattttgaaaatatgggaatagtattttaatatctcaactaaaggtttaatttaattggataatatataaatgaaattagacctaatagtttacagtcttatttagttcataatactgacatttttctcaaaacttagcacttacctacaatttaggaatataattgtggtgaatgcaaagaaaatacattttgtattttcacaaggcaccattatttatggtgatggttgaataattgatttatgtattctaacgttttaactaccctctttatctctcttttatttttttttcttaaacacacacgagattgttttcctggacctcaataaaatgtttatatcgtatagaaaatgcagaagtaacatattccctcaataattaaagtgtgattttaattttactgtctattttctgaggtaataaaagttgactcatgtatactttcttgtaatttcaaaagaacattcaggtgtttcaggaagttctgtaactcgaacatattaagtgatacaggtagcagttttccttcactcctagttctcataacaccataagccttaataatggccattcccattcccttggttatgttttctttatatttctttgtccatagacgtgccatccagtccctatggagtgaagatcatagagctgtcgcagaccacggccaaggtttccttcaacaaaccggactcccatggaggtgtacctattcatcactatcaggtggatgtcaaagaagtagcgtcagaaatctggaaaattgtacgctcccatggagttcaaagtgagtcaacaatttcaaaatgtgttggttaattcaagctgatcttcagtatacctgtatgattggctttttcggtttcctccaacattttcttttcttttaataaaatggtgttgggaagatattttctgtgccccattcttcttgataataactcgaatacagagtgaatagtttccatcttcagtaaaaatgaaagagcttagtagaatcagcagagttcaattctggaggaagaagtcactttaaaaaaattcgttggtggaaaggcaattgctcacatactagatatgatggctggattttatgaaatgtatgctcatgtttcatttattaatatttctctcaagaataggtgtgaaaatgatactgcaaaatgtagttaccttctatacttatgaagccatctctaaaaatctgtagaattttatatatttgtttactttttgtatttttatatttttttacttttatatttctattaaaaatcaaaataatttacagagcttcttttcacttacgtaaaatttcatcgtcttatgaaaatgtagtttgttttctcattaggaggagacaaaactaaagcaggaaataataagaattaccagcgttggcctctgttgtttaagacacagaaccatactgagtgttccaaaagggaagcataaaatagtgaggaaattaatgttccataggtctgttctatgaggatcctaccttgaccctaacacatatggtgtaggggttcagtaaaaagcaagagccttcctgagaaagaaagagggaaccaattctagtgaacatagagagaaagcaaatgaaatcatcctggtctcatctgtgttgaccctactttatcagtttgcactgagcataactatgggtttttgatagaagtatcagaaacattaatcagtcatctatcatgtaccatatacttcaaataatgttctcaaactgatgagctcatattatttattttaattatgaaatacttggattatattatctgtgcacattgtgtggtttaggagagatttataaagacagtgccccccaaaaacaatgagtgagacgaaggactatagtttttttttaaaaaattattaacctggatgcaggaatattgtgctactttaaattttgttttgttttattttattaaaagagagaaagggccaggagcggtggctcatgcttgtaatcccagcacttttggaggctgaggcaggtggatcatgaggtcaggagaccgagaccatcctggctaacatggcgaaaccctgtctctactaaaagtacaaaaaaaaaattagacggatgtggtggcaggcacctgtagacccagctactcgggaggctgaggcaggagaatggcgtgaacctgggaggtggagcttgcagtgagccgagatcgcaccactgcactccagcctgggcgacagagcaagactccatctcaataaaataaaataaaataaaataaaataaaataaaataaaataaaataaaataaaaataaaagagagaaaaaggagggtggtaggtgaaaaacagaaggaaaaaaggcattatttcctaaactgcataaaactcagtgtttgtgctcaagcacaagcacacagaaaattaatattaagtctgaatattatagaaattgaacacggcacaaaagtgctgctgcaccctagccctgccaaacccaggaaaaggttaataggctccctccagacttcttgcaaaggtgcagcacgatggagaatttatagtgcccttgatctggccaagttgatcaaggtaaaaatcctgacattttatcttacctgtccatctgtcagaggcagatcactatgtttataaaactgaaatataataacaaagcacattcgttactttgaaatgagaaataactgtcacagaaattagaacattcagagtctatataagtacatactttacctgttggtatattatgaagatacaaaatgagagtcagaaacttgtttggtgagtctagaatatgaactagggaagctgcgtgcatagaatgtttagtggcctcagactgggacagttaaaagcttgcgaatgagaataaaatactcaaaagtcttgtggctagggatttctcactttgatttgaggaaaatgacagcattagtacttttttctgtttccattgttgattcatcttccataggtatgttaatgagtaccttaaaatcaagttacagttatgtaatcaaaccactgtatgatctcaactcagtgcagtataaacatgaattttaaatttgactactacattaagctcttctttttgattctccctttcagttatttaataatatatttggcagacactgtagatatattatcatcttccagtattagaaaaaaaaagttcaatattgttggtatagtggtgagcatcgctgccttccagaataaacagttcagccatgcacagtttaaaacttataataatgtttaattttgcattcacattgtctctggcctccatgaaagataaacctcaacctggggagcttaatggtgaaatgaactgcatcttgtcttgggaaggtgaaagagatcaaatacctcatgtttctggtgctgttgacctcattgggctgtcgctgtcacctgccctctgtgggacaggcatctaagtacctgccccttggggatgtgtgactggagtgcaagcacaccagaaggagatagaatatttcatttttggagatagaatattcctttttggagacagaatattcatcatggggtgctgcttagcttgagctctttatacctttcctcaccctttacttcagcaggatttcttttaagtgtgaatgtcacccactaacattatgcaatttccacttgaccaagagaaatgctccacattctcacttagctaagatgtaagaaactgcatttctttgcagctgatctctttctcattttctttctcctcattttaaagagacatagtagatcaatcctctgtaaaagcagaagtccaaatttccaaattgcgatgcaaatatcatatctctcctctcatctcttgtgccaaacaattcagtgggttctgttcacctcttggacttaccttcacttactgggagggaagcatcactgcgctttcttctgggtggaagacttactagtttcatcagtggattttttcctccgcctagttttctgcttacattgcggggagtgggaaggacagggggcatgggagttaattctcaaggcttgggttgcaaacccagtttaacatcttcttctttaactctgcaggaggtgcctgacctcttctcaaatcttaggtatttaatgtttttttcttctctctatgaattgtctcagttgaaaattacagcactacagaaacatgcccgctacatgtttccatacagtttcttatggctgtgctggtactattctttctacttgagattaagagtacctgtgtaatgggatttatttattgctgcatttacactttatatctcaaatggtgatgtgatctcactttatatataaaatcatgttttggggaaaaccaagtttttaaggatttcttagtgtagactccatatttgtatagcaggcatgaatgtaaatatgtaactgtaagatcaatataaatgcaatgagtacccagggaaagaagctgagtaattccattgggaccacccctaacgttgtaagatatgtgtgtctggcacttattctttctttagccaagagatgtattattttgtaaagacatagtaaagatattcatcagaataacatgatttttgctgacagaaatatgaaatgtgatgttaatagtcataattatatttactgtaaattgacaggaatgatttgattattgaaacatatgacatagttttgactgaaacgttctactttaaccaaacatactttcattttgtttctgtgatttcaatgagtcactatgtcctttaaagtagcatttccaccttactcacattttcccatctgactgacttaggtccttttaatacttcccagaattattgttttaccctgaaccacttacaacatactttcacaatcagtccttgaaagtgctctcacagtaaaattccctcttcctccagaatgagtgactgccaagtggcactgtatttcagatgttatattgtattgtgcatattttaatatataacatattatattttatggtacttctcttacattataactctgaaggattttttctcctagtttataaactccatgagtggacctcgtatgccttgtttatgtcattgtttcaagtaccaaaagcatattagggtagagggaatactgaaatttggtggaggtaggagaatggaaaggattattttatagcacctctgactgggtcttaagtgaatccattatacatccccttccaataagtatgtgtctacagaagcaactttttttttcttttttttttttgagacagaatcttgctcttgtccaggctagaggacagtggcgtgatctcagctcactgcaacctccgcctgccgggttcaagcgattctcgtgcctcagcctccctagtagctgagattacaggtgtgcaccaccacacctggctaatttttttttttatttttgtattttttagtaaaaatgtggttttgccatgttacccaggctggtttcaaactcctgagctcaggcaatctacctgcctcatcctcccaaagtgctgggattacaggcataaaccaccacgcctcgccagaagcaacttttaaatggaaactaaggttcaaagtgtttatgagagattaacacacttttgaaaagagtgaagatgaagcagaattcagccaatggagtgagctacagttcaggctccagtggtatgccgggagttgtcgttgttgttgttattgttgtttttaaggtacacaactctgcactgcatataacattaccttgatcaagaaaccagaagactttactgtaattcttccactggggcatgccagaaattccacacaacatttcttccaacctctattgtattgacgaatatcagcctcaccagatcgatcatgtgagcaatttatactatgtgagcaattcaatggttatgaattttcaaagaagtatttatccaatcccccaccaagattctgtgtgtgtgtgtgtgtgtgtgtgtgtttctagcacacccttttatttcattctaaggatattaacggtcccggtttatgcagggatccccacttcatctccccattttgaatctttttttaacccactgaggccattcaaaaccaatcttgtacatcagagacccatgcaaaagctctgagaatctgagtaccagaaaactgccacaatttatagaaaaaacaattatatggctgctcctctagctcctggtctttccacacacttcatttttgatgtttcagagtttgctttccttttctgtgagataatcagtggatttgaaaagattttcgaaaatgatatgcataatttctaggtgtacttagaaggcttgtttttctggctatctaggagaagatattgttgaaaattagaatacatatttaaagcacatattatatatatatatatttgaatactaaggaaaagcttgtttgtgccttcgttttgtaaatcacaggttgtgttaatcatatatcttaaagtttaagaattctatgtaagcacaattatactcattctctgaagcatttgttagaagatagatttaggtttatctctgaaaatgcaggtacatatggtctcaacatttcagctatcttttccctctgagcagctttatttattctaatttatgtgagtttaatgtttagttacttttccttggtagtaaatatatatgattttgaatacacttattgatgtgtccaattctaattgctgatgtcaccacccagaagtaattatcagctcttggtggactgcaatgctatttaagatgaatattgtagcataaatactgtcctgttagtagattctaatcttaaataaatcattaacaaattcttattaattttaccttctcactgtgcacctggtcctaggtttaaggtacaatggaagccaggcctattattatattctttttgaaggtttagctgaagccgtactaattatcccaaccaatgatgtgacatgaaactaattttcaaactgtaaggaattgtgaaccagtcacatatcaacaactcgaactatagagatatagaatgtgagtcagtgtgactcttcattttgagtgagaaacatgtatcacagctgtagcaagactttttggttggggaagctacaggatgtattcattgccaaatcatataatattttgtgggtttcatacacctcactggccacttaatgaagagaaaatactaatcttacaaacagctactctttttttttcagttttcttaatacaaatgacaatatcaatattttaaaatgttaggccaggcatggtggctcacgcttgtgaaaccaacattttgggaaggtacggagggagaattgttcaaagccgggagttcagggtcagtctgggcaacaaagcaagaccccgtctctctaaaaaaattgttttttattagttgggtgtgaaggaatgggccagtagtctcagctactcaggaggctgaggcagaagaatcacttgagcccaagagtttaaggctgcagagaactatgactgtgccactgaactccaacctgggcaacacaacaagatactgtctctaaaaaaataaataaataaaaataagtaagtacttcctttttttttttttgatacagagtcttgctctgtcccccaaggctgcattgcagcggcacaatcatagctcactacaacctccgcctcccgggttcaagcaattctcctgcctcagcctcctgagtagctgggattacaggtgcgcgccatcacatctggctaatttttgtatttttagtagagatggggtttcaccatgttggccaggctggtctggaactcctgacctcaggtgatccaatcgccttagcctccctcagcctcccaaagtgctgggattacaggcgtgagccactgcgcccggccttcaggtttaattttagcaaaagtttttattttaatagaaatctggaggaaaaaatatttgtggtagagaaacttatttcagtttggtagaaaagtagtgctttcttgttttttatatacctttttttcctgatagggttttgaaatatagattttgatttataatcaatatgcctgttcttgataggtcagaaaactaattttgaataaaggcctgaattaaaatatagtaaagtttagtagatcagatactgaaatcttaggtgcaaatatgcaaagtaccagcaataaatatagccagcattcaaaaaacaaattattcctatttctttaaatgatatgtgttgaaatgtttttatacctatgatacacattgtcaaagaaaactactcttgcatcctaataagcagctggggatgtacaaaatgtattcatttattcaagtatagaacacgtgtatgttcattcatatactgagtcattggtttcattagtgaaaaataagaggaggctaatgaaacttcccaaatctcttaaaacagaggaactgactcatggaatatgtgtaactcctactagcctagttgtgcagtcataaagttctgcgttagggctaaagttatggtagaatttctcttagtatatttggctcaacaaactttagttcgctgctgatgtagagatttcatgcttacatatttctaacagcttgacattttaaaaaatgtgtcattaaaataaccttttacttaaaaataatttgatttttatatatgagttcaaagatggtaccaaaagtattcagacacccttcacccaacctccccttataataacataccacagtacatgtatcaaaattaatgaattatcatgggtatattagtagtaaataaactacagagtttattatgaaatgtcatttttaacagccttcctctattgtagttatctcatattgaaaataaataggcctggcacagtggctcatgcctgtaaacccagctcttagggaggccaaagtgggcagactgcttgagctcaggagttcaggaccaacctgggcaacatggcgaaacctcatattgacaaaaatacaaaaattagctgggtgtggtggcaggcgcctgtggtcccagctactctggaggctgagatgggaggatcacttgaacccaggaggcagaggttgcagtgagctgagattgcagcacggcactccagcctgggaaacagaaggaaatcctacaacagcaacaacaaaaaaaagaaaagaaaagaaaagaaaaaacagagaaggagagaaaaagaaaaaagaaaagaaaaaaatggattaataagaatgcaaacatggaaaagttcatatcatttttacctgttaaagatttcagaaattctattcaacaagtaaaagctacatgtacttaccaagcttagtaaacattttagatgaattttacttttctgtttgtttaagacaatttttaggtagaaatataagtcaagttaacaatcaaactcatttgattgactcatttaaatgactcgaattagcagggtttcaaataaaaattaatgaaattcttcataaccctgtagtcttccaaatcaaaattttcaaacatacttttctctcttgctcatcatacttcactctcaatttgtagatttttaaattctggaagtgtttctgcttcagcagtagttaatatttacatcaccttcaggtaaactttaatgcagttttcatgagaaacccatacatgtttcatgtctacaaaactaaaagacagttattattttacgaagcatggaataccaaaaacaaaaacaataccttttaagtgacatcctagtgaatctccatttgtcacgagacctcaagctttccagttctggcacaaagtgattactcataccatcacttcaaaatgatgattatcttcatttattttagttatattgaacaaaatatacatttaaaaaatctaattactaaatattctccaacaaatatatacttagtatatactattagtgatgcatgctttcaaatatttggactatatcaatgaatgaaacaaaaaattatttgcccttaaggagcttagattctaacagatggattcagatgatttttatgccttatttcgtaggtttaaaagagcaatggggaaaagggaagaagagagggattgaaaatattgagaaggttgggagacttagcaattttaagtaaggtagtgagggtaggttttattggcaaagtgatttttcagcagagactgggaaagatgaacgtggtatcctggaggaaagcctcccaggcagagttaagctgctaacaaaagtgcccttaggctggagtgggcttgtttgattaaggaacaaagaggtcagcatggttgcactagagagaaaaaatcagatggcgtaaggagatgaaatcagaaagatacgaggctaggcaaaggggtactctatgtaatgaacatgacctggcagtactgacatctcctgagggactgttagaagtgcagactcttgtatcttttctcaagtctatgaaatctagacttcattttaacaagatgacccgatatttacatacacattaaagttccagaagcactgatataacacattgtaagatcgcacaggacttcaattctttttctggtttttagaggcagtcctttggggtgttttgtgtagagtataatgacctgaaatatctaggatcactctagctactatcttgaggaaagagtgcaataaggcggaacagttcagaggcaatggtggtcttctaaatgaaagacacacagcactcaaaccaggcagttgaggagggatgggaagaagttgtcaaattctagacatattttaaaggtagtgtccagagaatttccttagatgcgtaggaacatggaggataggacatagggtggaaataaacgaaataaagaaactgaagctgattctgacattttagacctaaaatctcaactaaaagttgccaagatgggaaaaactaggtgcatcttgtttggtgagtggaaatcagccttgtgaattaagacttaaactgatgtctttaatcccgtagaaataccatgaaggcagtagaagatggctaaagagaggtctagactgtaggtacaaatttaaaagtcacttgcatttggatgcttaaagtcaggatattgtgaagtcaacagaggaataaataaatgcagagaggggaaagaaaaggcccatagactgagccattgtctggtttatttacatattagtatatattttcttaaagatgtttgctatataataatgagttacctaaagtgtgacttttctaaatttatggggaattttctacattgtgttatggcactactaaaaataataaaagaaaatattgatatgagtctatgttacttgaaatattttttaaggggagatgtacctcaaaagatattccacaagaaatgatctttctctttatcccaccctcgcccctcctacaaacactggattactttaactatacaaaaattttcctgctttctcttgtgggcatttagtgctataaattttcctctacacgcagctttaaatgtgtcccagagattttggtatgttgtgtctctgttctcaatatgcagccataaaaaaagatgagttcatgtcctttgcagggacatggatgaagctggaaaccatcattctcagtaaactatcacaaggacagaaaaccaaacattgcatgttctcactcataagtgggagttgaacaatgagaacacatggacagagggaggggaacatcacacaccggggactgccgaggggtgggagcctggggagggataacattaggagaaatacctaatgtaaatgacgagttgatgggtgcagcaaaccaacatggcacatgtatacctatgtaacaaacctgcacattgtgcacatgaaccccagaacttaaaagtataattttttttttcttttttcttcttctcttccctattgtgcttgctttctgtgttgtggaaaaatatattactgtgtatttttatgtatattagcagacatcttttataagcaatgagtaaaggattcatttggtccaatgacatgaatcaatgacaggtattgcatttttcaaatgctgtagcataccagatatgaagcttctttggataacagttctgatgggatgggtctaaatttctctttttaagtactcagtgagagatagcccttttccattatagtagaggcagttgttctgtaggaggacctatagatttctcagaggttcaaggtcattgtaaattaatttccacttatgcttcaaggtgtttatcctgcagcatttctttgaaactagttatttacaattccctggaagtaactggatttccctctatcatactactcaacttcactgttatagaaaaactttaagataatcagtatttgtactggttatcaaagggaataattctagtttttgcccattcaatgtgatattggctgtgggtttgtcataaatagctcttctttttttgagatgtgttccatcaatacctagcatttttagagtttttaacatgaagggatgttgaattttttcaaaggcctgcatctattgagattatcgtggtttttgtcaatggttctgcttatgtgatggattacgtttattgatttgtgtatgttgaaccagatttgcgtcccagagatgaagctgacttgatcatggtgggtaagtttcttgatgggttgctggattcagtttgccagtattttattgaggattttcataccgatgttcatcagggatattggcgtgaagctttctttttctgttgtgtctctgccaggttttggtatcaggatgatgctggcttaataaagtgagttagggggagtccctccgtttcaattgtttggaatcgtttcagatagaatggtaccagctcctctttgtaactctggtagaatttggctgtgaatctgtctggtcctgggctttttttttggttggtaggctattaattattgcctcaatttcagaacttgttattgttctattcagagatgtgacttcttcctggtttggtcatgggagggtgtatgtgtccaggaatttatccatttcttctagattttctagtttctttgcatagaggtgtttatagtattctctgatggtagtttgaatttctgtgggatcagtggtgacattccctttatcttttttattgtgtctacttgattcttctctcttttcttctttattagactagttagtggtctatctattttgttaatttttcaaaaaaccagctcctggattcattgattttttggagtgtttttggtgtcactgtccccttcaattcttctctgatcttagttatttcttgtcttctgctagctttgtggttagtttgctcttgcttctctagctcttttaagtgtgatgttagggtgtcgatttgagatctttctagctttctgatgtagacaattagtgttgtaaatttccctcttaacattgctttagctgtgtcctagagattctggtacttcatctcttcattctcattggtttcaaataactttttaatttttgccttaatttcattatttacccaggagtcattcaggagcagattgttgaatgtccatttaattgtgtggttttgagtgagtttcttaatcctgagttctaatttgattgcactgtggcctgagaggctgttcgctatgatttcagttattttgcatttgctgaagattgttttacttccaattacgtggtcgattttagaataaatgccatatggaactgagaagaatgaatattatgatgatttggggtgaagagttctgtagatatctattagtttcacttcatccagagctgagttaaagtcctgaatatccttgttgattttctgtcttgttgatttgtctaatattgtcattggggtgttaaagtctcccactgttattgtgtgggagtctaactctctttgtaggtctgtaagagcttgttttatgaatgtgggtgctcctgtattggatgcatatatatttagcatagttagctcttctcgttgacttgatccctttagcattatgtaaggcccttcttttgtattttttgatctttgttggtttaaagtgtgtttcatcagagactaggattacaactcctgcttttttttttcttggtaaattttcctccatccctttattttgagcctatgtgtgcctttgcacgtgagatgggtctccagaatacaacacactgatgggtcttgactctttatccactttgccagtctgtgtcttttaattggggcatttagtctgtttacatttaaggttagtattgttatgtgtgagtttgatcctgatcaagagtcatcatgatgccatcttgttattttgcaaactagttgatgcagtttcttcacagtgtcattggtctttatattttggtggtttttgcagtggctggtaccagtttttcctttccatatttagtgcttccttcaggagcttttgcagggcaggcctggtggtgacaaaatccctcaacatttgcttatctgaaaatgattttttttctccttcagttatgatgcttagtttggccgggtatgaaattctgcattgaaaatgcttttctttaagaatgatgaatattggcccccaatctcttctggcttgtagcgtttctgctgagaggtctgctgttagtctgatgggcttccccatgtaggtgacctgaccttttcctggccttaacattttttttaattttatttcaatcttggagcatctgatgattatgtgtcttggggttgaccttcttgcggagtatcttagtagtgttctctgtattttcctaaatttgcatgttggcctgtcttgctgggttagaaagttctcctggataatatcctgaagtatgttttcctgcttgtttccattctccctatcttcttcaggtactccaatcaatcataagcccagtctttttacgtagtcccatattctgtcatcactcctattccacatagtattggaagttcaggcctgtgcaatcaggcaagagaaagaaataaagagtattcaaataggaagagaggaagtcaaattgtctctgtttgcagatgctatgattctatatttggaaaaccccatcatctcagcccaaaatgcccttaatctgataagaaacttcagcagactctgaggataaaaaattaatgtggaaaagtcacatatattcctttacaccaacagtagacaagcagagagccaaatcacaaatgaattcccattcacaattgttacaaagagaataaaatgcctaggaatatagctaacaagggaatgtgaagtacctcttcaaggagaactacaaaccactctcaaggaaataagagaggacacaaagaaatggaaaaacattccattctcatggataggaagaatcaatattatgaaaatgtccatactgcccgaagtaatttctactttcaatgctattcccatcaaactaccatagacattcttcacagattagaaaaaaactactttaaatttcatagggaatcaaagaagaccctgtataaccaagacaatcctaagcaaaaagaacaaagctagaggcatcaagctacctgacttcaaaatatactacaaggccacagtagcaaaaacagcatgttactggtatcaatacagacatatagaccaatgaacagaacagagacctcagaaataacaccacacatctacaaccatttgatattctacaaacctgacaaaacaagcaatggggaaaggatatccttttcaataaatggtgctgggaaaactggctagcaatatgcaaaaaactgaaactggaccccttccttacaccttatacaaaaattacctcaagatggattaaagacttaaatgtaaaacccaaaaccatgaaaaccctagaagaaaacctaggcaatgcagttcaagacgtaggcatgggcaaaaacttcatgacgaaaagccaaaagcaattgcaacaaaagccaaatttgacaaatgggatttaactaaagagtttctgcacagcaaaataaactatcatcagagtgaacaggcaacctacagagtgggagaaaatgtttgcaatttacccatctgacaaaagtctgatatccataatttacaaggaacttaaacaaatttacaagaaaaaaacaaacaaccccatcaaaaagtgggcaaagaatatgaacagacacttcccaaagaagacatttacgtggacaaccaacttacgaataaaagcttaacatcactgatcattagagaaatgcaaatcaaaaccataatgagataccatctcacactcgccagaatgttgattattaaaaagtcaagaaacaatagatgccagagaggttgtggagtaataggaatgcttttacactgttgatgggaatgtaaattagttcaaccatcatggaagacagtatggagattcctgaaagatctagaaccagaaatataactggacccagcaatcccattactgcatatatacccaaaggaataaaaattattctaccctaaagacacatgcacacgtatgtttattgcagcactatttacaatagcaaagtcacggagccaacccaaatgcccatcaatgatagactggataaagaaattgtggtacataaacaccatggaatactatgcagccatagaaaggaatgagaacatgtcctttgcagggacatgaatgaagttggaatccatcatcctcagcaactgacacaggaacagaaaaccaaacacctcatttcttactcataagtgggagatgaacaatgagaatacatggacacagggaggggaaagatacacaccagggcctgttgagtgtgtgggggcaaaaggagggaacttagaggataggtctataggtgcagcaaaccatcatgccacatatatacctatgtaatgaacctgcacctgtatcctggaaattgaagtaaaataaataaataaataaataaataaataagtaaaataatcagtatttggtcttagctttaaactactatacagattttaaaatcttaatgagttacagtgcttttaaaatttttctactagagtattttctatgattacactatttctaacataaatgcccaaagaaaaaagactatcatttctaaatgactatatttcatatgataaaggagaaattgactataaaattcatctgactatgttaaatgaaactgcagtaaacttatgaattgcaaaaaagaagaaaagtaatccacactaattccatattttcagtgaaagaaaatttgttctgatttgcatgttgtggaaaggtttctgtatgttaaaattcaaataagaatatcttggactgtgttcattgcacccataaagagaaccatagctaaattaggatgttgtatgtaattacattcttaatgattttaaaccatgtagatcaaagtatacaggcactaagctaagagaaaaattaagcaaaataacaattttaggtaaaattacttgtctgctagaaacctcctcacttatcttaagatgaagacacaaattcatacataattctatactcagcctggtctctgctatatgttaaggagaacttctatgcaaatactttttttaatttttcaataaaattaatgagcttttctgtgcatgcataattttatgaatcaaataaatagtacaaataaatgatattaatttatgtaagaaaaatgtttgtgagtagtgagaaaacaaatatgaatatttcatgagtgttttataggagtttaatccacgggaggagaatgaaagtattcatagtgcccagaaacttaaaaaaaaaaaaattagagctcatctgactgctcaaacatacactcttaaggcaaatttaaaattcaatgtacatatgatgtttgctagaatgtagcttttaagtccctaatcccagtgaagaattcttgtgggctctcatgcacattttgagagtgaattttattgatagcgcattttagatgacatttaaatataataactataaaatttttgaaattatgccaacatatactattgtattaaacattatttaacttttggattattaaaactacttactataaacattaaatattttatctattatagtatataaatgtcctcaaaggttaaggaggggtatagagccattccattattcactcaatggcttaagatgcttatatcagcaagattctaatcttctatttcaatagtaccatcctatatggagtgatgaatgccgcagactgacatgtacagatatgatttcagaggctggtactatcttggttctcattgcttttactttatgtatagattatggagataatattattaatttttcttatttttagcatcttgtattcgttctttttctgtgtatcagtgtctgttcatctttcttttaatcttttaaactaatgtactgttttgattttttaaactaatgcactgcctgatttgcctttttacaaaatctccattgcacataacagtgttatttaaagatgcacctattccagggtatttgaaagatcaatcatcagggtacacaaagataaatcagaaaatattttcaattcatctaatcaaataatataaattacaatttaaataatcacactgaataaatgattgacaatactgtgtatatatacacattatatatgtatatgtatgtatgtgtgtatatatatactattttaatatatgcgtgtgtgtgtgtttgtgtgtgtgtgtgtgtgcctcatgtgtcttaatatcttagtctctttttataaattaggagacagggtttcgctctatcacccaggctggggtacagtggcacaatcatagctcactgaagccttccaaaacctgggctcaagcgatcttcccacctcagcctcctgagtagctgggactacacacggctaatttaaaatttttttcttagagaagaggtcttgctgtgttgctcaggatggtctcaaattcctggcctcaagtggtcctcttgcctcagcctcccaaatcaccgggattataggcatgagccactgtgccctgccttagcctttcttttctgccttacctcatatcttttctctacataaatacttggcactttcatgtctgtccacttattatgtccaatatgcattttactttcttacagtcatgcatgaatttgtgttattcctcctccccatcatgtatgtatgtatgtatgtatacacacacacacacacacacacacacacacacacacacacatatctcctgtcaccaaaggggattcccttttgtctttaatgttagaatacacagtagaagtagcacatgttacacacaggttaaatgctgcttttaatttaaagggtgggagaaagaagtaggaatatatatatatataggtccaatatattccaagcgtttatatgagaattcatgagattcatttttagtggaaatagttttctcttcctttggtaccctataggaactattgctcatacaggtattttgccagctgctcacttgttaagcagtatgacatcagtcacgcctctctgtcttgactgcacattggagggcctgtttaccgttcatttggctctttgagtcttccatatcatttgaggtgaataaatggattatctaattactgtttgtttacactcaaataaaactaaatagttactgttttcaaacatctataaattatcaacatgtccaggtcaaatcaaattaaaccatctaagcacattgatcgttttattctttctttggaatttgtagaaagagaatccacaagcttttctgggaagtaatgttatgtagttagctgttcttcaatattaattcttaatgaacatgagtaaaccttcattctacttaccaagatttttaaaaaattccattgcaacaatttattttattctaagtgcagacataagtagacattttagtaaaattaaaatagtagtttctcttcctctaaagcacagtcttaattgttactacttctttctcccaccctttaaattaaaagcagcatttaacaactgtgtaatatgtgctacttctactgggttatctaacattaaagacaaaagggaatcccccttggtgacaggacaagcctgtgccgttctggtaacgtgggcttgtcaatgaaaaataagataaatttcacatcacagagaaaataatgggcttcatgacgctgcttcaacttggaaacctcaccagacatcttcatctccacagtttattgtgacacagaaacacatagcaaaaaatgtaggtttaagtttcaaggcccatgattttctgtccatggtagtgttgtcttttttccccatctattggttgggccactcatactacattctttatcttcaactctttcttgacaaatgattctcacttaattctacaaatatttgtcctgcctactctatttcttgatgctcagattctgaatagctttaaagaacacttcctttctttcgttttaggatatagtttattagtgactttatctcttatgttatgtaattttcaggaggttttttatctcctctgatttataaatgtgaactgaccacacacacacacacacacacacacacatagatgtatgtacacacacatatatattatatacacacatatacatatgtgtatatgtatatatacatacatattctaacacaaatgacttcctgcttggtcatcttaattgaaatgatatatgtccattcatttaatttaacaaaaactgaaaagcacctactatgtttagggagattttagaattttgaattgctagagattccatagtgaagaaagtaatacaatgtcttcatggaatttacattgtcgggggggaagatgtatttatagatgcatcaatagataaaatatcaatttatatataatatataatatataaaatatattatatattataaataaatatataatatatactatatatagtatatatattgtatatatattgtattgtgcatataattgtatatatagtataatatatacaatatattatatattatatataaatatatatattatatatatttaatatgtattatatatttatatatcattttaaaaatataatatatattactttatatattatataatatatataatatataatatattactttatgtattaaaatatagtattactttatatataaaatatagtattactttatatattatataatatatataatatataatgtattgcattatatatgaataaacatttctatgaattacattatatattatataatatataatatatattactttatatattatataatatatataatataatttatactatatattatatattatatattattatatattatatattatattatataatatataatatataaaaatatataatatataaaaataatatatacatatataaaaatataaatatatttataaattattatatatttaatatattatattaaatatatattatatataataacaaaatatatatagtttatatataatgtttaatatatcaaaatttataattttaaaacagttaatgatataaagtatgaagaaaaatgaagcagagcaagatgctgtgtaagtgggggtgggaatggggactaattttataaagaggagtcagcagggtctgtgatgtttaagcagagtcccatatgaagtgagggcatgatcacataaatacctagggaagcctagccttggcagaggtcagtatgaagggcgtcctgcctggaatggcatgatcagagagaggaattaaatgaagtaggagtagacagatagccaagccaatgtcccatggggccttacaggctatggagaagactttgcattttattcttaatgtcatggaaccttattgaaaatctcgtaagtaattctagaaaggagtataggagaggtcatttttaagtactgacattattaaaagggatcattttgagtagggaacaacctttctcaaaatctcctttaccacatgaagcaaaattttggggttagaaaagtaaaagttaccttctgccatatgtttagtaaagatgaagaatccttagtgcattgtatcacttgatatacattttccttctttttctacattaaacaaatgattctttgctatttttgaaattctcatctttactagttctcaaaatattgaaatttagtttccccctgtattattcttgaattagtccttagaatataaggcgatgtttatagttaaggtttgtttttgtttgtttctttcttcggtatggtgtttttattcttgaaatacagaggtctacaatgacaatagttcagcgtcctatgaatgttctttttgaatttttaaacagtatgatgaaggtaagttatgatttaccatgcctaggatttctagttacatattgtggaaattaattgatctaactttgtagaaatttgaccacctacccttttctaaatatatatatagacacacacagagaaatcatacttttcctgtactaattacaaaactctagagtgatgttaaatttttcatgcattaaacaactaaagcctacagtgtgccaaggcactgttcaaggaagtgagaatataatcacaaaaattcttccctaattcatattaaattgtatatatggagtgtgtatgtttgtgtatacccattggaagtttgttttattctgccaactgatctaattagataaacttagtcaatatatttgaatcccacattccagcagctattttctccatttgcttttattgctgtttgtggtgagtttgatatataattttaaggtgttaacatccctaacttatgtatgggtacagctcataaatacgaacctgtgtcatgcaactcatatatgactgtgttcaaaataatgtgtattagactgtaaaacgattttaatattttaaataactttcctgcatttgtcggtttcagcaggaaagttatttttaataacttccctgtatttgttggtttcagtattaattaatctcattaatgctaaactttgtgatcctaggttaaaaaacatattcaagatagcttcagaatgtttggtatacaaataggtctggctaaatataagtgttagctttctcaagcatctaaatgctggcgggcttttaaaaaaccagggctttaaggagaaaacacctgctctgtggttttgtagcagatatgaagtattcaaatttcttaataaatagaaaaagaaatatataacagaaacaggttgcacttgtctttctcattaagcaggtggttagtaccattatttgcattctcatagccttaatatacattttccttctctagatacaaggggaaattatcacaaatttgcctaaggatagcaattaggattactaatttattcttctttgcattttattaagctttaccaaatacaaatgaatttcataagggaagattatatgtgtttttacgtctaccattataaatttgtatgccaaataagatcacatggtttctttcccaaattctaacataatcttccactcagagtccttttaaaaggaaacctattggcaaaaaaaaaaaaaaaaaaaaaagtttaatttgtcctgtttgatgactcaatacagccaggatatcccagatcaaaagttattggaataatatgatttcatcgtttttacatttatacctacaattatttgtattcactgcaactttaatttagaaatactcatttttttgagctctaaaatgcaaggttcaagtgattttttttccttttaatttaggaggagatccaatagaataattcaaataagcattttcaggttctatgacatgctcataagaaaataaattattcatagaaatgtttattcatagaattactgtcctaataatttaacttctccagaaaacatgttttaaaatgctatatatcaaaataacgtgtaatctttcaaaatagcattagaaaaatataatgcaatattttcctgaaatatttgaattattatttaggaatacaattcttgtcacaaatatttagtgatgtgaaaatctcggcaaaccattcatattaattcatttaaaatatttaaataaataacttgaaaatgaaaaatttgtgttaagcaacaacaaaggacagaaagaaacataaatgtttccaaatatctagagagattagaaggtttttatggcttgaatttcattgaaaaataacaagcaatttattagaattaatggagatatctgggttaactatatagaagaatggcttagcaaagacaaattttaaatattattatgaatttcttcccaatataatattaaaaattctttcaaaataagagagaaaactttaaaaaaagaaacaaaaacctgcctagtgttgcaattggtgcgttgatctcaaatcttgttcacattctaacaaggcctctgggctttctgtgtgatttggtatgttccatagtagagaatacaaatgatatagcaagaacagttcattcatcattattagcaaatttgactgggaatcttgaatgggatatatgaaataaataggttgatttcatagtttaagaaatgacagaatatgctggccagagtgtataatagtaacaaagtggctggtacatgcatctttactacaaaaggcctaagaataaaatctctaattaaccagagaatctgattgactttattctgaatctctcttctctgtatttttagtgtgattacaatttgctcctgtgaactataaggaaaatgctgaattgtattcattttatagtgctagcaattcatgaggataatcagcatggatttacatttttttagtctaatgagaactcagaaacacgtaattaagtaaaatattctgagaaagacactgtgtcctctaatagtttaaattaaattttaaaaagatcttacaccatatgcaaaaatcaactcaaaatagattaaagacttaaaggtaaaacctgagcccataaatctactagaagaaaatttctatagaatgactgtttggtaccctcaaaatttatatattgaaacctagtcctcaatgtgatggtattggaggtggggctttgagaggtattaaatcctaagggcaaaatgctcatgagtaggattggtgcccttttaaaagatattccagggagcgacctaacttctacatctatgtgagggtggaatgagaagatgtctataagccaacaaccaggccctcatcagctgtcgaatctgctttcacctaaacttggacttctcaggctctggaactgtgagaaatttctcttgtttataagccacttagtctaagatattctcttataattgtctaaatgtaataagccagaaatgggcaccaaaaagtagaggtgctgctctaacaaatacctgaaaatgtagaagagggtttagaattgggtaatggctagaagctgtaagagttttgcagtacatgctagaaagtgttggcattgcctcaaatagactattaagggaaattcttgtgagggcccacaagggaaaaaagagctacatagaaagtctcagtattctttgtgaatacttctttgtgaagagaattctgttgatacaaatataaacagtaaaggacgttctgatgaggtctcagacaaaaattatgacatgtgttggacaatggaggaaagggcatcattgttaaaaagtggcaaagaggtctgacgcggtggcacacgcttgtcatcccagcactttggaaggccgaggcgggcagatcatgaggtccggagttcgagaccagcctggccaatatggtgaaaccttgtttctaccaaaaatataaaaattagctgggcttggtggcatgcgcctgtaatcccagctactcaggaggctgaggcaagataattgcttgaacccaggaggcagaggttgcagtgaaccaagatcatgccattacacaccagcctgggcaacagagcaagactccttctcaagaaaaaaaaaaaaagtggtgaagaactcaggtacactatgttagtatgctagtgtttttggtaagttacaacttgtgtgtgatggaatcagatattcgcctggaaatttctcaacaaagtgttgaagaagcagtctgatttttcctgactgcttatattaaagggctagagaaatacatgatttaaagatagaattattaatcaaaaaggatgcagaactttttaccgtatccattttgtaacaaatgagaaaaactgggaaagaacattaagggtttggccaggaggacatttgatatagagattgattagcatggatcagccatctcagtcgaagctaggagttaatttttccagacaatggaggaatgtccatgaagcagatacaaagataattagagctgccactcccatcacaggatcagggttcaggtgcctaggagacaggaagtttcaaaggaaggtttgaaggtgcctacaggatctcctagtgccatctcacatcgtgggctctgctcctgttacgccagcactacgcctctcattgtcccagctgtggccccactggggcctggtctcgggtaggacatggtgggtgccccttcagagaacataggcagcaaactttggtcatgttcctgtggaaccatctccaccagggcacaatgtgcccccaggccctgggagcgtggctgcctccacgtggatttcagaggaagggcctcttagcagagctgcaggctcaggtccctagctctggagagccgctgggccccagcagagaactggtgtaggagtggggctcaggcactgagcacacttaggggcagtgtgggagtggagcaaatcaatgggagtggagccttcttagccttggaaatggtgcctttattagatagacctcagagagctgctttgccccttctgcaatgtgaggaaaaagtgacatatgtataaaccaggaagcaggccgtcaccagacactgaacctgccagctccttgatcttggacttcccagcctccagaactgcgacaaataaaattgtgttgtttataagcctcctagtttatggtaatctcttttagcagccagaatgtactaagacagaaatatagggaaaaggcttcttggcgttggtctgcacaatgattattttgcatatgacacccaaagcctaggcaacaaaagcaaaaataaacaagtgggattgcatcaagatgaaaaacttccgcacataaaaggaaacaaccaacagagcgaaagggaatgtataaaataggagatcatatttgtcagccatatacctgataaggggtgagtctccacaaatatatgaaaaattcatacaactcaatagcacaaaaccaaataacccaattaaaacataagcaaaggatcagaatagctatttcccaaaaggagacatacacatggccaataggtatatgaaacggtgctcagtatcactaatcatcagagaaatgaaatcaaaccacattgagatatcaactcacacctgttgggatggcttttttttcaaagagagaaaagttaagtgttcgcaagcatgtagagaaacggtaacagtgtacacttgtacactgttagggaaaatagtatgacatttcttaattcagcagtcccatatctgggtatatattctcaagcgaaatgtgtacgtctatgttctttgtagcattattcacaagagccaagatttggaaacaaccttaatgtctatctgtgaatgaatggttaaagaaaatatgtatatacacacacacacacacatatgccatatttataatatatataatatatatacacacatataatattcctgtatgcatacatatgtgtatagaatgtttatatatattatatataatattgtttatatattagaatataggatattgttatatatttatacatatgtatacatttatatacattatttatatgtacacacatatgtatatagacataaaaaagaattgctgcatgatctcacttatatgtggaatttaaaagaatcatactcatagaagcagtgagtaaaatggtggttgccaggagtgagagataagggaagtgaagaaatgttggtcaagggatacaaaatttcagttatgcaagatgaatgcattctagagagataatgtaccgcattgtgactataattaataatgccatattaatgatacatatggatatgtgctaagttaataagaaatgtaactatagttaacaatgcatattaaaatgtactaagaggctacatattaagtgtacaaatacaaacatattaaaaaactggtaaatatgagaattggtagatatgtttaattagcttgaatttatggtgattatttcagagtgtatgcatatatcaaaacatcaagttaaaccccttaaatatatataattttattggtaaattatctctcaataaagctgggagaaaagcatatacagtaatatcatttttcttatttatcatttttatttttgtttgtattgaatgttttattgggagataatacattttccttataattcgcgtttatgaggattttcatttactacaaagtgctctctgtactctagttttatattaataggtcaatataaagctatgggtcatacaaagctttaacttaagctagaatcatgttcaaatccaaactctgatgcttagtggctagttcatctttctgagcctccctttactggtgtaggaaatggagaatgtaaccaaactctgttagttctggtattaaatgaaataggatcagataggacttgaatagtagatttttccctaaaacaaactttaatttggaaaagtaaaatttgttttcaatgttcagcaacaagagcagagtgcatttgtaataaaggataactactatagatttaacaagtgctctcattgggtcagttttctttaaaagtggtgtttcatttggtataatttttaaaaacataaattcaagcactaactgctgaattattattttacatttaaaatgtgtaggctagatgagggctgaggacagtatttatggtatgtgatatgtgtcctcacaagatccttataataaaaagattctcacagtatagtagccaaatacaataatgagggtgtgatcaataactgagaaaaattatatagagatgttattaggaggttaaataggtaaaatggaggttagagtttccgtcagcacagaagagagaagagcatttaattacaaaaccttaactcatcccagttcacctggctaaaaaaaaaaaattaaaaagtttgtggcagaaaaagaatttggcagtatggacatttagggaagttagcaattttgtgagtgaaaaaatttagcaattttctggttatctgacatcatgaagatattttatgaatattttataaaaatctacgcatttagactatagaaggaaatgtttagtaattacacatttgtgatattttacgtactcagtggaccttgaaaaaacgtcagttgaatttttcttgcataaataattttacgtatactaagaagtattatatttgaaatgaaaaatactataaattgtttatgaaacatattttgttcaatgaaactgttatgtttttaaattaatgtttttatataaggcaaagtttttctatttaaataggaagccatctgattttaagggtaatatgtacttcctgtataaaatctcgcagcaattaaactccaattgttaaattgtttattttgagtataacttatactcatgatggaaagttacataagcagtacaataaatatgttgtaaacatttggatgtgctgaactgtgatcttaaaataatgccatcaacatattgttttgatgaaagtcctagacaaatgacacatcattattagattaatttttctttccactgttcatcaaaatatatatccatataaatgttttattaaccaataatctatccataaaagttatttataccaaaatatgtatgcatacaggtaaaagtatgattcataaaatatttaaagtactgttaaaaaaactaagattatattattaatattatgcaagtaatgagaacttcaaacacaatataatttgtgcaaaaatgtaaatttcagaagtaagtgaaaatataattgaactgagatgattacatacctaagcttctaaggaaacttaaaggcaatttcattaataatggaattccctctgaagtcattcgtacgtgtggagctggcatcaaagtattaaaatgttctgcgtgtgtatagaaacagtaaaaaattatttttattttgcctgttgctaactcctgcagaagtcagtcagataattctctcaaaaatagacctgcttttgtttcttttaattgtttacagatcaaaagcttttttaagtgagaaacttgagggacttcactgtgttttcagatctatctgaggggattaacaccaagtgttattttggatgatcagttttacccttgctaagctttgtaatttctcatagctctctgagttgttgcacagtacttgacaatatgaacagttccattggggttaagtgataaagcagttctacatctggggagactgtaattgcttacgttgaataggacaaaaaccccatgaagagagccagggtttgagaaaggaaagagaacatgaataaaaataatcttactttagaattttgctgagcttaattagttaccaaatatgtatttagttgatgtcgttgctgcaattgttgtaaatattctatagcctctacttctcttgacagccaacaggaagtaatttataatgcattataggaacaaaaaattattttgtgtagttccctttaataaagtctggttctctaataaaaagagaataaactttcaaattcaaatttttctctctactatgatcatttccaaacttataaaaaatgtaaaaagatttatatttttctgtcatttttaagttaaagtgtttttaatgtatcttgacttttttgtcttttttgcctttatagacaggtgataaagcgttatttctaaaattcagttatatataaatgatgtagaaatattagtgcaggaaactagattctatagagaattcatttctgttgccgtgttaaagaaaaattcatgattgtttataatttttggaagaaccgtgttaagatttgtaaatcgtgctgactaaatatagctctaaaataccttaatttatactttgtccttaaaagcttttactagtttgtaatctagatctgctttctcctaattctggagtttgaatttctagtaaattacaaggcaagaacccatcccacacttcagtttaaggttctgttgttctgtttgtatatgcagatttagggaaagaaagtctcacattaactatcttcataatttgaggtacaactctattattgagtacacagcctttcattttccaagtggtagttttctttcagtccctaccttgggtgttcagaaactcttgtttggtaaaatgccagtaaattacagatgatttaatgtatatatcctctcatttaagaaaggcaagtcaaattacagatccaggctttgcctcctccaaatcttttccctctctcactttaatgtagtctcaatgtgtggagttctatttcacacaataatcttcatgttcacgcagtgttaataagcctcataataagagttattgtatcaaaacctgcattcacgaatcaaaaacaaactgacttcttgtatataaactttgcaaaacttacatcagtaggtttattttatacctcttccctataattttaaaggttatctataaaacctctctttggccagctttcagttttcatgttttagcccaggactgtaataacagtttagccatcggtgtgccctcttcgctcctttcttctgccaactgatgtgaaactcggtcagtacatgggtaagccttgaatctgagaacagaaacatgtgaggaaacagggaaattccattctgagttgatacagtgtaactaaggaaatacttagccttggcagaggtagtggggcatgcaaaactcctcatagcgcctgtgaaatgttgaaggaaggggattgctgacaatacaagccagaaagagcttttgcctgaaatactcagataattcaagtaagatctgcacttgatttttttttgctggggtatgtggggtgagtatcatctttattgtttaacctaattaataacctcaacttttctcacagtaggtttgccctggtactttggtagctctgctgttatcaatttttaacctacaaagatgaagaaatcatatctagaataatgatctctacacttctgatttatgtaggattttatttgcaattgaaagtgcatgtttaaattcttttgcttctctttttgccttgtattaagaaatacaattgaatataagcattgccagatgccatcaccaacgcagccaagtcacagactactgaatgctcttaaaatgatgttgcagctgcaccaggatatcacagaaatatggaaaggcataccatatatcaaagttggctgttttataaaagggcgtttattcttcaagtcttattccaaaacatgttaggccttaggacagccaatatgatgttatagcacagtctgtgttctattgcactctttaccctaatgaagcatgactagatatagcatggggcgtatgagcctagctcacctttgcttttgcttttaaaaatattcattatctgatttaattaataaaatattgtgatttttaaactcttgttaaaggagttcaagaccagcctgagcaacatagtgagaccacatctctattaaaaccaaacaaaatgctaaataaatgccttgattgtaaacattgaggaaaagaatggaacaaaaggaagcatcaaaacaaattcatgttatgctgactttcagcagaggctttacatcttaaagacagtaaaattccaatttactagcattttagcaaccttggttaaatttcctcttctcattccataatctatataaacaactctttatctatgcactcagcttctcttcagtgtaactatatacttttctggggcttaaattatataccattaactaccagttatcaagtgggtttgggtttcctgaaaagtttgcaggtcattaccctgtcagaaatcattgaattcaagccttggctatgccatttatccttgcagcttctaatcagtaggatttctgtgccaatcaatctattcccaattggcctcccttaaatctgaaataatgtattataatctgaggcttcaataaggcagtacactctaaaaagcaagttcagttttcttataaggttgagaaattgagaaatacgaaagtaaattttgccatttggaaatttaattttttttgttgattttagaacatctgtacaggattaagtaatgtctggttgatatgtgtgttgtggctattaatatttatctggtattaagtaatttttatatattttttcttttaattttggacacagtacattcaacaatgtatttttttcttttctagaatgtgataatatagattaaatgattacaatacaaaatgctaagccagacctagtggcccactcctgaaatccaagactttgggaggctgaggtgggcagtttgcttgagcccaagaattcaacaccagcctgagcaacatagtgagaccccatctctatagaaaacaaacaaaatgctaaataaataccatgatcataaatattgaggaaaagaatggaacgcaaggaagtatcacaacaaattcattaagtatcctcatataatacagagaatatgttatctagtaaattataatataatcattagaaataatattaataaattatattacaatgttattgcatgtatatcatttctggtcatggtttatgtaaaactatagttctgcaaagataatcttaattacctatgatttaatcttttatatctcctaatattaattgattatgtgacttggagttactgtgtaaaccagacataacttccttttgattttcatcaagatattgttatatcccctagctgagtttctgctttctttagcaaaagcatttaaagaaagtggcaactataaaattctggtggctccatcagatgaatttttgaagatgtaatattttgaaatctataattgcatccaaaattaacaagggtcaaataacaagggttgacatgacccagatatttctagtaacctttatttccttgtgccttttcatattcttccttagtgtcttattgaatccaggtctggtagagtatgtaaatgagaagaaactcagagtgaaaatacaagttatgagtaggcttcaaactagaattaaaacaacttgatttgatttgaaattgtagaataaactatttttgctgtattttcaactttgtcacacttgtttgacatgactaaatcacctgacattggaagccaatctgcatattaaattccatgattctattaaatactatagaaataatctatgtagagtacttctacttgagacacatacagaatatatgcattttagcatcattaacatcattcttggtttttggatattaaaaagatttaactttctactttgagaatgtgtcacaaatgaaacgggtaattttctttgaaagtacgtggcttggaaagctaaaatagaggtgaagaagagaactattcacaaatcagtttcttcttatatgacttatctattttttaggtatttcatggaaagatttcagtgaaattattcactcagaattgtaatagtttgatttgttttccttattaaaatgtgtccaattagatatatatgtatatatatgttttattttgttttgttttgtttttcttctagcaatggttgttttgaacaacctggaaccaaatacaacttatgaaatcagggttgcagctgtaaatggaaagggacaaggagactacagtaaaatagaaatcttccaaacattaccagttcgtaagtaatcatctctattttttattctcttttgtcattttcttcacttgcaaatttaatagattttaaaatgtagggagatgtttcaacacttttgagacatgaattatgtctttggtgaagtggtttctgaagacagtgacatctgagatttattaacataaaaataactttgctttagagcaaggcagaaaaaaaagagtgcactagaatacactcagtaaaaattgttcccgggaaattgtccttattgcaaaagtgtccttcttacttatggtctgattaattggattgtagtcttcagactatattctgggagaagaaaaatgtctatgtaacatgttcaatattttgttctttttggaggcctgactattgaccttgttccacaaattatatgggctctaagtgtcagaaaaggaatcattatgttaattcattaaaacagtgactgcaggagaagccttgttctgataactatcatattttggggaattgtaagttaattgagtttacatagagtgaagattaaattttaaaagacttaacatttcctttatgttaaataaattactttaaatgtgagaaaacataataaatacgactgaaccactgttataaaaatctatgcgtaacactgcctgatatatatatctttatatatatatatatatcgttgtatatgtgtatatatatatctttttatatatatatatatgttaggacagtcaaaatggctgcaatatattatcttacagagtatctctctattggtaatcataaaatctgtcaggtaagtttcttttctccattcccaatgctggtggttaagataaccagccagatacggtggcttacacctgtaatcccagcattttggaaggctgaggcaggcagatcacttgaaccaagaagctcaagaccagcctgggtgatatagtaaaaccctatctctccaaaaaacaataaaaaaagaatcagctgggtgtggtggtatgcacttgtactcccagctacttgggaggctgaggtgagaggtgagaagatcacctgagtctggggaagtcaaggctgaaatgagccatgatcacactatggaactccatcctgggtgacagagtgaaaccctgcctcaaaaaaagaatgaagaaaagaaagaaagaaaaaagaaatgacaataacctgctgagaagaaataacaggtcatgccggtttagagatatgaaatccttttcagtgcatggtctgtttttcttggcccttcacatagaaaattcttgcactttggtagatccctgttctattcaaaacaatataagcatcattgttatatggctatctctatgttgaagtataatatcaaaggcaagtatatgaatgaacctagaagaaaatgaaatattgaaacacaggtctataaaattggatactgcaaactttattcaaatttgcacccaggaaagaaaatgcttattaaagcacatttactaattgcaagtcattatctttactggtaggtatatattccatacagactgatgtgttaatgtattcatattaataaatgcttacaaaacatttacaaactaaatttacattaagaaaataaaaatgatttaatactattaataataagagaaataaagttttacatttgtgcaatgctatacttttctcagagcatttgcatatcagtgaaaataatatatttggtcctcaggctacagttttggcatgacacttctagatttataatgttgctgcttcttggatggggaaaatgttcagaaattatatcacaaaagggcaatgtcaaatggtaaatccaggataacaccatatattttgattacattactgttctttttattaaaatatagtttatctaggtatctgaaatgtgtgcaaatgaagaaatgttgtattgtatatctaggtgaaccaagtcctccatccatacatggacagccaagcagtggaaagagctttaaactcagcatcaccaaacaggacgatggaggggcccctattttggaatacattgtgaaatatagaagtgtaagtaccttgtttattgtcatatcatgctaggttttttcaaattaaattgagttgcactgaatttataaacatatcaggagagaatgtgtatttagtaattgtggtaataaatgctaatcttccttccattcctgacagtcatcattgtgatttttttttattttttttgtaaaatctaagcatggatcatcaaagtattctcatggttttcatcttatgatttttaggtgtgaaatgggactagtaaacatttcagaaatgagatattatttcccctgttttgctgacaagcttctcattttatttgatattagtaacttcaggctaagtccctggcaatcatatgttaggtaatattattagaaaaatcacacctcaaaacaaattaatcaaataatttgacttacttatccataatgtttaacaaagaatggccacggtgaacttgatgaagagggaatccttttcttcaactttaattagcactatccagtaaggatgtttggagagctaaaagctgcacacagatttttgatagaggttagaggtaaacaatgttcactagttgcagagtcatagagtgacactatggacaactgcgttttgccttcagaaaagatgatttcaaaagccactgaaaataatttcttcaacatttttttccataagtaccttggagtattggtgtctactgtaaaataagttaaaaatgaaacacaattttaagttaaattttctaagattcatacaacatgcgttttatgcttatgttgactgaatccatattagtgctatccaaattaattatattttagcagatcatgtttaaaataattactccatagtagtgtgtgggttaattttcagtattttctcatcaattttctaaattataatactgctgcttctaaatggaaagatctacattctgaggggtaataaaaaagaaaaatttgattttgaatggcatattttaataattaattttagatatcaaatcaatttttaaaatttaagattaatactcctttcagaggacaagtttttgtcccagctttcatactcaagtgaggtctcctggccattctcatttgcacatttgtaaacacggtagaagagagataatcttttctagggaggtaggcttggccagaattcatgaattggactgttagaacaggctttccatgcagattgttgctcacaattctaggatgaaaaaatttattgtacaaaatactgggggatagtaacagtttgtaaggaattctaatacaatcccacagtggactctaaaatgcaatgactacttgtgagacaacgtgttgtatatttttatttgtactgtattgtcagtagtggccccagtcattgatgtaatcaaaaatatttcttgagtagcactgcatctatttagagcaaagcagagtcacaaatggaaataatgacattttagacagccatatatttatgtatacatatacacagtttaaaacataaattactattttaaaaatctgacttcaaattcatattgatttctttaaatgtggattagaattaatcttttttgagaagttatgtgtgaaacacagatggatagaaataagtaagattttaagcataatgagattagtaagattgaagagactcaagttcatataatggtactcaataaattttacctttgcacatagttgctaaggtatagttgatacggcttactgataaagtttaaacaagaacaaattttgtctccagtaaagttactccttccgttttctcgcctttctctttctcctcccaacctaatggtaaaagtgcctggtttcttcccagttacccagtgtctgtgcttaccacgccaataaaagtatgtccttttccctcctcttctttctaatttccaaccctttctaactccagaagtgctagaggatctgtttttcataacacattggaaatgattgattgtattaattcatacataactataattgtctgataatcaatcaattactaagttatccatcttagagctactatcattttaacaggggacattgttttaatagtagaaatttaggcacctatggcaaattttgcaaagggaatgattccatatcctttgtattatgagataggcattgctcactcttggctattttgtattttgtaattaatcaaatataaagtgatactttttcacatttttttcaagcgccaatggaaagttagagaatttgagtgacttggtggggagagggaacagacatcagaatgtaattcataacagtctaaatatggatggcagcagtactgggcaagaggcaacccctcaatcactatctcatctcagctcaactgcccagctcttgtgccttcggatacagccatcctggcacagtttctcttgaccatatcacttgatagtatgccttctagtttcatcattaaaatactctatatatccctattttgttgttgtctcttctcttctccacctcctccatcctgtcaacatcatgctctgaggatccaattggagataccatgattgaataaaaaatgaaataactacttcaaaaagttcttgatcatctgttctctttatatgattccaaactacttcatctattagtttctcaaaccacatgaactccacagtggaataaagtgcaactgaataacttgaaaaaatggtttagacatattcaatatatttttaataaaaaatgaagaaaaaagtacatagaggaatctggaaaataagaaacagctctaagattttcacttcttgatttcttctttggccacatctttcaactccagtgtgcacagggctatattctgagaacaatgtaatttagacaatatattctttatatgacttgatttctagcagacactgaatctaagcctttaatttgggtttcactgggaaaggacaagaatagctatatcctattatagaaagtgtaaaactccctatagattatgaaccaggaaacaccattattctgtcagcctgtaatacagcacatggctttgttcactcacccattacaaagacagaatttattggaacagaactagagtaataaaagcagaatgagatatttctgtggactcttcatgaaaattaatgtctctaacaataaatcagtaagtttaaaccgtgtgtttggaaaataaagacaaacatattaatctcatgaaatgtttggaaaaaatcatgaagttatttttacatctactttgtacttatagtgtcaatgtaacttcatataatttagtacatagatttttacatgtttccatgagtttttcaccattttatttctaatttgatgatagctatgggatcataactatcacttagtgttggcatattaaatacatttccttaactaaaataattggtagcttaaaatcaattgtaaggaagtactatagggactagcatttgtaagtcttaattgaacttcttaagtaagttggagtccacgaggttgtacactatctcaatggccataggataagaaaggtaagtttgaaaagggcattaaaataataaataagtaaaatcaagctttggttcttaagaaaacattttccagttaataatgtttatgtatgtacatggaaatttatttaaagccattatagtttaagttttgaagtatttttaaacaatgaatacttatggacattaaagagtagcaagcattttagtaatttttctttgctgtaagttaagaggatgagttttattcttctttgtatagatagactatgtgttgtctgaatgaacaaatacagcaagaaatcaataaagaaattagctcactatacaattataaatagtattataaatagaataattaatatgagaaataagaaacacaagaaaaaatgcactgccaatgtttatagatatgagaacacagaaggtaatgaataggaaaattagatttattttgccttaagtactatgtgggtggtggagactagcaacagattatgtagggcctaattttaaaaaagtttaccaagcatcagcacatggaacaaaggcaagtagaatctgttatgatcatggaaaaagagatttaaatttagaactcggctaaaatcttcaaacctttaaatcttccaaatgtatatatatacatatatgtacacacacacacacacacacacacacgcacacatacacacacacacacgtatatataattttatatacaattcggtgttttaaatttaagattaatatctttctcagaggacaactttttgtcccaggtttcatgctaacaatgatgagtacctgtttgtttcttttggatattctgatatggagacttttgtgcctctacccaggacagctctgaaggactcactggtctctcgatgaatctgacagtgccatggtattcaagccaggtcccttgatgcttctcgtttgcccatttgtaaactcttcttgaattctgtatatggtctatctgtatatatatataaaaatatatgcttgtgtgtatatatatgcaattatatataatatacaaaatatatgtataaatatatatatatatatatattatatataaaatccagactgatcaatcacctctctgacattgagagtagcaaatggagttttaaataatttctgggccttctgtgaggtcatgtaaatatgaatacctgaaccatgctaccagggaatccaggaaccgggaactgctttatatacatacaaaatcttaaatcataggacatgagagtcagaagaatcaaaacttcatcttgcttatatgagctcaccttctctattgtcctctcattttataattgttcagtttatatttaaaatgatgctgataatacatttcatgagacttcaaaaggagtcagtaaactgtttcttgttatgaataaaagtatcaagcagcccctgaaaataagaaaatagtgacccttacaccttgcctctaatcacttccctgtagagatgatagccaatactttcctgaatgctgatagtatgacttcagaatcactattaagaagtaccctgaattgccatatggccctgctattttctgaccaaaaaaaaaaaaaaggaattgcttaagagaagcgataccaaaggcaaatgaccattttttttcagtagctgcccttcaacatttaattggcttattaataatagccatattcagcaaatcatctcattaagttacctaggggaacgttttgcaactagattatcttaaattgttccctaggcatttcaacctttgtaaattagacactctacagatatgcatacttgagattttgatgccaggggagtatttggtaacacccactttaatttttttcctattccctaggaatagcaattaggggattaaaatgccttcttgcctaatgttgaaaggaaaatgtaattgatttatgctgggaacatgttagagctccctttggtttcttatactatcagcccaaatacttaaaatgatggagggccctttaatttatcatattaagggcttcaacaaataagagctaaatgattgttaatttacaagagactgccttgtgtttgtacagaagtttcaccttaaatgtctaatttccaaaaatggtatttttgaaggattacctgaaggacatgacatctatctatccctctaaagaatactttttttttttctggggtaattaaggtctcattttttggcttattttctggctctttcacccacatcttcactcagatacataacaaaactgaattccaagtatttccacaaaaatatttactcacatcaaccacttcatcgttacatagaaagtactgaatagctgaggtaatgccagggccacagggacatgcagctgtctgctgcctcatggatcccttgtcttcataccacccttcagtgtccttgccatacaccccttccttcccatatatgtgtgtgtatacacaatttataacttataaaaatacatgctacatgtatatatgtgcatattcatactgaatatgctatacatagcatttacaattatatgttgtgtgtgtttgtgtgtgtatatatatacatacatttaacatatcatctcaaattacttttgggttgactttttaagcttttttgttctatgtaggtctatatatataacacatatataatacattataatacatatatataatacacatatataatgcacatatatatatatatacacaatttttaaaaatttatatgaaacagctacagtgtttgcttatacatctcccagtgattatgcatctaaggcttaaaatcactgtgtttctttttggatttaaagctgtgtaaaaaactgacaccttcttgtcattaactcaattaggacaaatgaagagaaaaatggcgctagagtgtattatttccaggaagggtgatatcacctccccactggtgacctgcctagcccttgactttattaggtattatgtgcctccattccaccttctcatttttcaaaggcctcatgtctttcttctgggctggtttgcaaactacaacatgagggtattgcacatgtcttggtcactattgtgttcatgccttctagaaagtcctcactaatcaattaactgaataaataattgatgaatgagtgggtgaagacagagggtgttgtgatagctgtggctttttagcatagctgccctaagcatttcaaaattgcaactaggtttctttcttaaccttactgtccattgattaacttagaaaagttacaacctctcttctcagttattccatcgttcatacatctcataatactttaagtagtactggctacaggccatttttataaaaacagatattcctgagtttcaaaaatcaaggcaagtgcctcttgtgtatattgataacttgtagtgcttgttcatttaaaaccagggcttcgttaggggttctaatatcttcatttttacacgaaatagcaaaacaggccaaacttttctgttcctttgtaatggaagttctatgtcaccaaaaagtttatttcctttgtaataaaagttctgtgtcaccaaaaaaaatattaactagaaaaagagaatactagtatgttatcaaaattacaatgtcttcttgcctccttctgaaggacactccatgtttgagtactgtcaatttaatgcaatcatgaatttaactttcacaattatattttagagaacaaatacttaattgtcaccaaaaatggagaatacatcgttattctttatactcaaagaagcagtgttaaattgtggctcaacatagagtaatacagggctgagctatgaggttaaaagacatgtctgcatctattgttatagacaggctgtaatttatttatatttataccctgggaaagtgagatttgcagttgcaatgatagattattagatacatgatttcagagaaaatgtttcatttccatacagtttttatggaaacagttatatcctaaaatcgctgttatttttttaagtggttatgatctctaaggccctgaaatacacaacttactcaattttcctcattgcttttccaaaaacctgacagaagcagctgctaccatcacttttgttataaagagaaggaagacaagccagaaaggttaaggaagctttctgtgtttaaatttttaatacatggcacaacccaataatcacactgttttagataatttaatttataattgtatcaatttatatttcattagtaattgtagttctaatggtaattttttcaaataaagggaaattcaaatgtcatatggtcaaatttatattttagaaaaagaatgagatagtatttaagtgtagaatgtttgagaataggatggcgttgttttatattcttatgctaatgatatatttaaaacttagtaattttgtttgtatattattttatgtcataaaacatcatagtagtaaaaaataccagtgataatataaatctatcattcatatccagactttatttcaagatactttatctttcttccccccaaaaaactttaacaatagtccctggcaattcttttaatggacatactaagttttttctgtgtatcatgtttcattttcccattcacataatgatgaataatcaacaaaatggccaaaaaactaactgatatatgtgaaataaaaaaaaaaatcctaatggaggtaaattgtcaaccactgaataaaggattaatgacaaaaccactttttggctaatataaacaacattatattttatatagaaaaatgttggaaataatactggcttcattgacacagcaacttcatgtatccctgtgcctatgaaaattgttccaatatccaatataagtatattgttccaattccaatataatttttttaaaaaggtgtcactttagtgtatggatatttacaaactgcatttttattgctttcacagaaagataaggaagaccaatggctagagaaaaaagtgcaaggaaataaagaccacatcattttggagcatctccagtggaccatggggtatgaagttcagattacagctgccaatagattgggatattctgaaccgacagtttatgaattcagcatgccaccaaagcccaacattattaaaggtaagcaaaactatattcttttttagactgaacaataaatatgataccacctttttataacccttactgacttttcttattaataattaaaacaaactgaaatgtaaattccaggttctaattattattgtgacatatcatacacaaagtttctcatcgctcttgccatagggtattgcttaatttgtaaatatattttgaccccattaatagttggagtggtggagaaagaatgactaggagaacatagagagtaagagtgactgatgataatcaacgtgaaaagtgtctattgaggccatacgaaagctttgctaagaagacaatttctctgccaatcatgtggagactgatgatccaattcttgttagatttgaccgaaggtaatgatgagccaacctatgcctgaccaagcaagttgattttggaaacataaaattagtcacaaagaaaggcaggaacagccacaaatataattccataaagacctatacctagagttttaagaaggctcataaaatgggagaacactgtaaatcagcctttgcaacacactggttagattctaccattgataggtaacagtgcttacattgttacatcttagtatgttagtaatattatgaaagttcacaacagggatgttaaaacttttattcagataaatgctcttgaagtaaagatgcaaaaatttattctgactcaaaataacatttaactctgttcatgagttgctaaattggtcatatttctacatttattttccctcagttattacttttaatattttaattttatgcagacatgtacagatatttatgtatatatggtatattctttataggtacatatatacagaaaagaacagcatattaatccatgaaaccaagatttatttgtcttattatattagagtataagtatagatatataatatttttgaaactggaaaagaaaactagctagttcagtcatgtcattaaaccctcttgtaatttcaaattgatgttaatttcacatattatgattttgttatatcatacatcagttgtttagtaattgaaagcagttttatatgattaatctttcaattaaaaagtaattagtattggttataaggtttaaaaagtaattgatattagagctttatattgctaatgttaataaattctaccaaattataatttaaaattaggaagtaaaaagtccctggaaataacactggtatgttacattttaaggactttttttactattttcaaagcccttctgcattgattatgtcattttattcttaaatctgagctggataaggaagcattattctcattttacaaatatgattttaagaggtttaatgacatgttggaggtcagaaatatttctagttatatgacaaatctgatgcccttacaagataacacatctaaataagaatgactgaatgtactatcgaattcattacctctctatgtttgaaacatcagaaaccacttctacaattgtaatgaatacgtatgtggtaattatatttcatgcaaatatcaggaacatgctatacgtattcccatactgagccagagcctcctccaaaggaaaattgcaacagtatatactataatctcccaaatttttaatttagtgtatatattttgaaacataatgaattaacttaatccgtttaatttaataatgtattaaatttaatatatgaagtagaaggcaaaattttaataacatagataaaacataaaatcaaaaaaatagattttacacagattactaaatgttatacccccaatgactctgctatctttgtaagaaattgttggccgggcgcggtggctcacacctgtaatcccagcactttgagaggcccaggtgggcggatcacgaggtcaggagatggagaccatcctggctaacacggtgaaaccccgtctctactaaaaacagaaaaaaattagccgggcgtggtggtggacgcctgtagtcccagctactctagaggttgagacaggagaatggagtggacccgggaggcggagcttgcagtgagccgagaccgcgccactgcactccagcctgggagacagagcgagactgcgtctcaaaaaaaaaaaaaaaaaaaaaaaaattgttgatgataaaaaccaacaatacgtgtagacaaaaggttgaaaaaattaaaaggtaataaaagcagatatgaaggcaccaaagtaaccaagacatgctgtaattcatttcctctctctctatatatatatatttttcaatttgagaaactcgtgtcctgagagctttgtaggcaagacctggaaagaaaatggatagaattctggtttatattcccagatttgttcctgtcacataacttgtcaaaataactgtttcctcatctctaaagtgagttccttctggttctgcaatgttaagatctatcatttattaatttaagaattatttattggagtacttctttgtgacaaacccttgaatgagtacaaaggatttatctgtgaaaaatacagcactgacccatgtcccccaaaatctccacagtctggtagagaagacagatattcaacatgagttagaataactgcaactggccgggcgcggtggctcacgccagcaatcccagcactttgggaggccgaggcgggcggatcacgaggtcaggagatcgagaccatcctgactaacacagtgaaaccccatctctactaaaaatacaaaaaaattagctgggcgtactggcgggcgcctgttgtcccagctactcgggaggctgaggcaggagaatggcgtgaacctggaaggcggagcttgcagtgagccgagatggcgccactgcactccagcctgggcgacagagcgagactccatctcaaaaaaaaaaaaaaaaaaaaagaataactgcaactaagagagatttttcttagaaggtgagtttccaaaggaaacatgcaggaatgaactttccagggaaaatgtgtgacgtggaaggtatctctgggacaagaaagagcatgatctgttctaggaggtggaaaaggcatgtgtggaagagaacctggaagtgtgtgactatagataaggtcagagagggaatgcaaaccagataattcaagggcttttaaaaacgtaattgtaaaacatcttccaaaagaaataaataattgtaagcagaaaagttgtatgaagagataggtattataaacagattattctttctcttatgggtaagagcaactgatggatgaacagcggtagaaaaaataaaagaacgaaaaatttcctgacacattataagtgtagactaacgctgcctttgcaatagattggattcagtcagtaatgacttctaggtttcttgcttgggcaactagaacattgctgatgtcatttctcaaggtgaagaattttgtaggagaagcaagacttggagaatgaggatcaaacatcagatccatttagtatttgttaaatttgaaatatcaaatcgttggttagatatgtgggcgtatggaaatgagaagataaccatggcttggaaacatacaccatgatgctgtcagtgttaacaggtgaatggtatgtgagtgagggtaaacccgtctaagcaatgcctaaaatatctgaagaggggttgatgtctgtagtactcatttgtgtttgccagtaactagaagggcgactggcacagcagtgatttccagagaatatttcttgaattactgaagagtagaaagaagttaagaactgagttccaaggaactatcatattatactagaagaagaaaccagatcactccacccctcatcatgagactaacactttacaaacttactggaaaaacaggagcgtagtatcttggaagttaacaaagggtcatatttcaagaagaatagatgtaaagtgtcaaatgctgctgaaaggtcaatggaactgaaccagaacagatgtgaagtatccctatcacgtgcagctttgctgacgtcattgagagataaattaggtacaagtgggcagagaattgtatgtgaggttagggagtttagactccatatttatttaatgctttcaggaagtttttctatgaaggtgagcagaggagggaaaaagccagtgttagaaggtcttttatgatgaaaaatgctagatgaaacaaatcaaggagtcgtggagcaatcacacatacaggcacacagacaaagccatctgagaaggtaggagatggtattcacccctctaaaccatgtagctgatacaaagccatcacaacttatcaaaaaaaggggaaaatgaaatatttattttatttgtaaaaatgtcacaaattcagccaggcgcagtggctcacgcctataatcccagcactttgggaagcccaggccggtgacaaggtcgggagtttgagaccagcctggacaacatagtgaaaccctgtctcttctaaaaatacgaaaatgaaccgggcatggtgacacccgcctgtaatcccagctactcaggaggctgagacaggagaattgcttgaacccgggagttggaggttgcaatgagccaagatcgcgccattgcactccagcctgggtgacagagcaagactccatctcgaaaaaaaaaaagttataaaatcgtgtctaatttactgttactgaatccggattgctaaggcctcatagaaagtcatatcagaaacaaaccataaattaagaattgtttgatttagatctaggttttgtgaggcaattttaaaggctgtgatgatggggaatttgagaacctttcagatcttatagagttaacattatatatttgcaaaatatgaaaaaagatcatataattttataacattttatttttcattttaaaatgaaatataaattcaaacatattagaaataagttatctgtaataaactagcacatcttaagtcttttcatttaagttagagaagatatagagtttaaaggttaaagtggttttaatttatttttatatttcatgcattgtagactgtcaaaataagttttctggaattttgaatttaaaaacccattacttatgtatattagatatatttaactttttgtaaacaatagggtaagtctagagaacatttatttgttggactaaagcactattttttcgttttttatcaacctactccctttacattcatataaaatattacattgataacaataatttttcttgtaagtatgctagtggatactacatttcttcttagtttataattattaaaaaataattttgtaattaatatttttcattttttcttattaaagatgtacttattttgaaagatatgtattttgatttatttaaaatggagtttccataatcaatcgtgttccttttcagaatattcatgcagcataactccatcttattttattttataagaaacaagaatattgggaaactatagcagattaattgttataaaatgactaccaaactatggatttcaaggctgatagcatggcatttattgatttgttctgtaatcttaatgactaaaaatactactaaacttctggactggatataatctaatgtttaaaaaaatccttggaaataaataaacttactttgaaaaacattttcaccatttcttttggcctgccacatgtttgataacatttatatttaaccaaaaaagacgttagtatctttcagtaactgcttccttcttttcctgaagacatgtctaattttaatattgactatcaatataatttgatgacaataattctgttcaacattttttatattcaatgataaaataattctgccctctgggaacatgtaatgcatacataatacatacaaaatagttgtttagatttaacaagctaaaaaaaataatataaatcaccacaaaaaatattgctaaaatatttcagttactttgtattttcatgggcttttaatttgtacttccaatgaactatacagtaaaattattttgatcacctcaactctagtttcaagcaacactaataaatccttcatcactagataattcaacatgaacagaaaacaactttcaaacacatggcaaatatgaaaatattattttaggattacatttatggttgttttagaacataagtttaaaaattctaaaacaatggtgaaatagaagtccaattacctggggaaacttcatcttaaccctctggaattttcagtctaacctaaatattgatactacacctgcagcagcatttagtttagcatgtagtgaaaaagtaagtctaaaaaatattttcataatctttggttcctaaaattgttttaaaagagatgcagtgacatatgtctggagtttgcttatggccaataggttaatgcttctagcttctatgcttattgcaaattttaattatgtgaatatgcaattttcacttatatttgttggtagcttgtttattattaaaatagaatggcttttattaaatatatcctaagaaattacggtagaaaaaattaccatcaaacattgtgggatatattgagatcatattaaaagtagcactgtgaattcaccaatagcacagtgaaatgactggtgacttttcccttgtaatttacattttcaacttataaatgaaagatattcacatataagggatcagtgacagaattaatttctgagtaatgcagaataaacatcaatattgacctttgtatgtttttaatatgtgacaatacatagaaatgttttatacaagattttagccattcttgttttgtatgaaagtattttttgtaggtttgcattaattgttaatgactttgtgtaaatcttgcattaattattcttttttctttcctactgtcacgttttttctcttttgatttcctcgtttgtaactctaccctttattttcttaattatttcattcttattctattttcaaaaacaattttcatcatgcagataaatgctgtgaagcgaataaaggcgaaaatggaagccagtcgtggcagctgaatgctgctgggttttctttcattatagccataagtttgtcttgcgtgttttaatgtcattgttatatcatatggtatatcctcttatgccctgaaaattaaaaaaaaatagtaatagcaaggcttatctaaaattataataaaatatttcctaaggtccaattaattatgcatgtatcttcacccatgaatgattaagctttttctccttcccccaattatcaaccttttaagtggataatttgtcagaaaatcaaatgaaggaaattcaatcgggattgctactttcagctaccagttcactgcataacatactttattctaaattttccattaattcctaaagttgaccttgttaaatagcatgtcacttgtacttgaaacttaagcctttgctacatctaatctttcattattattttgcaaataattaaatatccatggccatactttttaaaaatcataattttattatgtagaattgtggatcactactattgttttttttactgttacttttaagtataagtttccaactttatgaacatttctaatatttcaatgtgtttaccatttatataaaacataagcattatattttattagatgtgtatcccaattgtgctgcttattttccctttgttgaaccaaaatgtcttaaggaataaatgtgaaacagtttcctattttaaatttgaacaccgattaatttttttcattaagtgaaaatatctctgcaattttcccagaatgaatgttaaattaaatttgtatatgtctaaaaagttacacccaattcactggatttagattacattttgagctgacctcaagtcctattgttctaacataagtagttatttattacatttttctggacatctggtagtcagaattcttgcaagcattagagagagagaagaaaatattatagacactcctttaaagaagttgaaatcaagatgggaagaaattgagattggaactagattccaaatttcaaaggaatttcgatttgagggagtagcatgaagaatgatttttggtctttgcaaattttcattatgtgaatatgcaattttcacttaagtaatctttacctaagtaatttcaaaacaagtaaagagtgtttgtgtttttcacttgcaaccacatcttaacaagtgacttttactacttatttatttaggacaataggaaacaaccagatgtacatatatgcataaaagtgaccataacatacttggtaaatcaaatgattgggttctggactctgtgattcattcatcaaaagctatcattttgttgaacagaaatatttttcgtgtctctttttaaagagatagctacagaatcttttcatatgagggctaggcctctctttcatagtagattttcttttaacttatcttttccaaactcctagctgtcaactgctatcctttcttgtaatctagtaatagacctgtagactgcagaagcaacccatcaaccgataaaacacacttctggccggctgggcgcggtggctcacgcctgtaatcctagcactttgggaggccgaggcaggtggatcacgaggtcaggagattgagaccatcccggctaacacggtaaaaccccgtctctactaaaaaatgcaaaaaattagccgggcgtggtggcgggcgcctgtagtcccagctactcgggaggctgaggcaggagcatggcgtgaacccgggaggcggagcttgcagtgagccgagatcgcgccactgcactccagcctgggcaacagagcgagactccgtctcaaaaaaaaaaaaaaaaaaaaaaaaacttctgcttccctcctttctcccctgctgagataaaacgatatctcaactcacacattatggaaatataatccatttatagggcaagttttgtttttaaatcaccataaccaatattccgtttattaaataactatcattgcatattaaatttctcgatatttgagactgaagagtttatattggttactaatttgtagaaggcgttgataaaaagatttctagtaacacctccagaaactgttttttacattcattgtaaccttacttgatctttccaataaattagagacatttctgtgagaatttcatgtagaaatgatcttgacttaggaatgacaaaatatttttttggagatcacggaatacttatttagtaagttagtgcaaagtttatttatcttgaagttttacatatcataactcaaggtcactaagtgatataaagaacattcaaagtgaggtatacacagaaataagatacatcaatttggcattttgaaaagaacctaatattaaaattatgttagcagagttatatacatttaaagagttgtttgttagattttaagcatctaagtgtggatctagttttagtcctaaactttataagcagtctgtcatttggccaaatgtttattcttacatgaacacctatttcacaactctgagatacacataaattcttttaaaaatattctcagagatggtaaaataataggctttgtgatctgccttatttctctaagaaattaaaaagtacaaaactaaacaataaagctattgcattccaataaataaaaccttagacattttacatcctaggattttttaaaagttttaatgtgttgctgagttatcttttatattatctgaacaatactgttgttatatgcagccataaaaatcagacagtttacttgtttattttaaaaatgagtttgttacttttttggctttactattatttcatctgtctacccatctaagtaaatgtgattactggtaagcaagacataaaaatttaaacttattttaagtatcttcctagtaccatccaatgatttttttttcatacaatggagttttacataaaattctgtctctgaagatgtataaatttgagcttgtgtgttgagtgtaagattagtcattatatataatcagaaatatatgtctatgtccaatggtgtgtgtattgtatcgttcactgttaaaatatttcaaaagattgttttgaccgtattaccagttatgaagctagattgatttacttatgcatgattgccattatctgcatgtggaatatcaggatttttaaaatatagatctggatatctccttctttctcctcccaatctcttctagtctgtcttctttcctccattttacagtcaacgttactggcctctctaccccaatcaaaactataattactcatcagttcacagtaagacccacaagtaccatgtttcagatatgctaacagagtaggcctaggaggtagcagtaaattctttcctataaaatgtattcttacgtggaaaaaccttaggtgagttgctatttttgttcatttctttcctaatactataggtcattaggacggactaagtttaattttataaactctatattcatattatttccagaagcattttgcaaatgcacatatatgccttcattcctggtatacatgaacaagattgaaattaaaatatgtaaacattttaaatatgcctatctatagaaggggttagattgatgtttaatatatatgcaattttcacttacatatagcaaatacatataaagacaaataattttattgcaaataaatttgactttttaaatattcaagttctttttaaattaacaaagttacaagtatgcatcctagtgcacatgttacacacaataatatgcaatttgtgtcaattgggaaaccattataattaattataatattttctgtgtaagaatactcattcattatgtttgagttaaattaaagctaaaacaagaaaaattccaaagtagtttcaaccacgtacaattaaatttatgattagtcatttatgttaaatgaaatatattgtacaagaaagaattaaaccatgaacttttggatctggaggtattcttagatacataaaaataattttaaatattaatatggtatatttaccctgataatggagaaataaaaccttaaaattacaaattattttaataattcaagatggatactgatatcaatacaataatacaatatatttgggtctagctttcaagactaatagccagtattatgcatgataacatttgagtttgtagtaattaagaaatatccctagtcatgtaaagttttctttaaaggtttaaatttgatattaatatgatataagcaacattaagagcttgaaatgatcaattctggtattaaactaaatattatcacatatatttttgtctggccttgtagtattatgatttcactcactgaataaagataaactataatattgatcatacctaaatatgtaactttatgtgttttattatgattaatctgtgtaagagataatgtaacatcctttaaatgatcttttaataagtccaatttaattatgttttctttttctattttaatttttatttatttatttttttattttcttgagacagactcttgctctgtcgcccaagctggagtgcagtggcctgatctcagctcactggcacctccgcctcctgtgtacaagcaacactcatgcctcggcctgcctagtagctgggtgtgctactaggcgtgcagccaccacacctggctaattttgtatttttagtagaggcagggtttcaccatgttggccaggctggtctcgaactcctgaacccaattgatcctcctgcttcagcctcccaacatcctggaattacaggcgtgagccatggtgcccagcctcatgttttcacttttttaaaatttattttcttttatcctttcttactttcttctaatgctttatttttaattttctccctttttctctatttctgtctcttcctcctttctctttctctccatttctctcttttgttctgtctctctccctctttctctctctgtctctcttatgcttcctttctaaatttttggccatgaatgaatggaatatatttcctctattatgtttctgttcattgtttgtaaattttaaaatactaacctttgtggtatagaaatatgtcataaaagcttcagcaaatctaatatattggatagatagctgaaatctgcatatttcaaataactgaatatacagatattctacaaattgtctttaaaatgattacaacttatgttgaaattggtgacgaggcatttccaaattaatctcataaatagtattgtttaatcattaatatttgatagttaaacataatattcagaatatatttccacagtaaattttgggacttaactaaagaaaaaaattaacacttattaactcgttctcttaccaattaccatataaattggagtattattctaaagttaatatggtttgtcttttaaatacaaagttgtattattccttctatatacttacataatcccaatttttatctaaggaaaacattccctcagtttaaatctaattttatttttttcaaaattagacaaagatgagagtttaatatccatgctttgttttccaaaaacctttagttttgttgtctaaaattaagaactcaacaaagatctcttgtaataattcaacatattccctggctattaactaatttccaagcctgaactgtcagtaaatgttgcacatagcctggaatagtccataacatctgtattagctaatattctgtaaaactaaaaaaaaacaatatccaagaaatgtaaaaaataattatgtttaagaattctattagtgtttctgagatggtcttaactgcatttcatctcctttgttggtagactattatttcatctactttttaaggatactttcatccaagtagaattaaacttaattttaattgtgaactaatctaatattggttgtattaaatttagatatattgaaagttctaaaactatgtatgcttaagttaaattcaattagtctttatcatttcattttagttagtaaaaatatgttacacactgtaaagaatgcataataatgagacacaacttcagtttagaaaatatatttttatttttattctatgtatgtactgaataggggctacgacataaatctagctagtcttattttttttcctaaaaagcaagcaattacaactactgttttaaatagtgtacacaattcatgtacccctttcaagaatatttttctcttacattttcattgatgtcatgtataacgcttctgttttaaagtacttctgatcatttaattgcattcgttttcatcatagcttgttttcttgaaaaaaaagtatgctataagtgtattgtcctcagtatcatcttatttaaaaccctcaacataatatccagcactgtgtgtaatcctatgcgtgtgtttcatagtatattaaatgtcattttattttctgtacctctgtgtctccattgttgtaataaagaaaactgaggaaaagctttgttatacgtgttttctttattactggtacagccttttttgtccttgtcgagtgttgtcatatctaacttgatcaaatttaatacaaacatttatttacttaggagcaggtaataaacttatactcattaagttactcaatttttggataacccatacatcatcagcagattcataacaattgtatattgtaaaaataatttcgtgacaatatcaaatattgttacttccattgtaaacttgttctagtgtcttcataaaaacatcgatctctagtgggaggccaaaataatcatatatttcaataaaacacatgaacatagttaacaatttcagtaatataaagattgttaactagtctccattgctagcaaaagtccataaaggaaatataaacacgtaaagtgatttttctccagttcctttggtcatttcttttgttttgggcaccaaatgaataaagttgcagaaattgattaacattctgtgcttatccactgcaaaggtatgaaacacaaatagtaagttgaaattttggaataatactataagtaatataaaaattatttaattagcttttatagtgtaaaaataatttttgacatagatataaacagaaaagtcatatttttcttttagagcaaaatgttacattgcctgataaatatgaaatgatgccaaaattcaaaagagaaaatgttcattttcaggattttggattgttttggagcatatttaatttctcttattccatgacagtccagtccaaaatgtatattttaatatatacattattatacaccttttgaaacatgcttgtgtatatttcaaaatgaaaattttaatgcatttataagtcttatatattgtaatacttatacttcttttaaatgatacaatagttatagtagtttgaaacatacaccagaacagttatttctttttattatttttgtttttatttttcctgaatccccttgataataggatgatatcaaatggagggtatcttggaattcttaggaatttgtatgattactgttgtagtaaatatatattactttattaattttttattgttctactattctgggccattgtgaagaaactaaagagatttgagaaaatctgaagctattataaccaaactctattattttattatatcaacaaactgaggatcagaaaaaccaaatagtcattgatatagtcaagcaactttgattctcagttttcctcctatctttgttgtattacactaaatcaaagttggtacaagtaaatttctgacctataagttatatggtcatatgtcttaggtctagttcctttgctattttcttgattggcctgtggagaacaacaacaaaaaatccctatgtgtcagaggaaaggctatgtgtacaacaaccacggtttcatccattaatcacagtatttctattagtcagcttttatctttctcactcaaacttttacatatagctgcttccctatgaccaaggtaagtaagcacacattaagtttatggttttaaatgaatatcaaattaaattttcatcactttcttgttttttacacatattttgataacaccttactaaattacttatttgcattgttggtagagataggtaatttttaattaatatatttttatttactgtccactaaaagtaagatattttcatctcaatatgcatcctttttattttaagaattcaaagtaaatagtttcaacacttacaatttgcatagcagctatgtgtttgcttctctactgatttcttatttaatattacaaagagaaacaaaatgttaaaaacaagtattcaagatagaggactttattttttctgtttaaatgtggttaaataaaaaataaattatcttcaaattggcatttctgttttaaagaatccatgaataacacacctaaattttactattgtttctagaatataatttcacaatagctgaatgggatatacttgtatgtaatgtgaagtgcaaactacccttggctcttgaaaaacatcctatttcttagtgcatgttggcagaaaacattaaaatttgtatggaatttttatataatagcctgtgactcacggtcctgtcaaatggctcagtcgtgaaagaaagtttaagtgaacagggaaaaatatttatctaaaataggatgtggtatggttcactgctgaattctattacataaaaacaggaagctaaaaccttttaaagcatctatatgtgttactcctcacttaatatgtggagtttttttatttgttaaaggacagaaaagtaaaagttgtttttataggagataatcaatctaggcatagtagccctttccatgcaggtaatagagatatcaccattgcatgttttcccttttaaatagactttagtttttcaaatacttttagatttacaccaagattgaatggaaactaaagagggctcccatataccatctaccccagtcaggcacaaccttcctgataatgaatatctaacacccaagtggtacctttgttacacttgatgaacccacagtggcacattgtaatcacccaaagtttacagtttacattacggtgcatacttggtgttgtacattttatggatttggataaattaataatgacctgtatccaccattttggtaccatacataataaattcactgtcctaaaaatcctctgtgtcctaaaaatcctctcttcctccctcctttctccactagttcctggcaatcactgacctttttactatttcctaggtttgccgtttccagaatgtcacttggtcgcaattttacattatgtagcctttgcaaattgatttctttcaattagcaacatgcattcaaggtttctacgtgtctttttataatttgatagctggtagcataaaatgtcttcagtcagatgcattatataataatagacgtttataaaccctacatgcttaaaatatgtagttttaataatgtagaattgatgtttttgtataactctaagcagaaattgaaatatctaagatagaatgcagtgagtatctaaaactgaaaactttaaacatcttaataaattaccatagattccaagaaaaataataatacgtatcttctgtgtatttgctcacatttttcatttattctgttacatgtttagaaaacgcagaagttttataaatagttaggaattttatattggagaaaattaaacagtttggactttcgaaaacaaattataaaatatgaactgaagtataatcatatagagatatgtttcaattttgtaatatagtctaggaaaataattttgtttgtacaatgaaaatatatttttcattttctatatatggagcagcctttcaatgttgacagaaaaataaaattggtcaggtgggggcttaaacaaagaactaaaaataaaattattcagttcttttacactggctaatacatatttgggtcatattcatgcaaatctttgaagctgccttttctactaatcaatacaaacactagttgttttatagcaaacaaactgcatccatcaaagtcaaccagaaatataaccaaatttaaacagtatttggaaaagtttagagttagtaagataatagcaaacatcaaaagaagaggttcaactggatagttaaagaacacaaaagatattttatatgtgccaaaatgatctcagttccaacatacataataatgtgaaatgtcagtatagataagataatagatattttgttgtgcaaagacttcagatattttatgatttttcatggtttacagttgtaccacatttattaaaaggatattttaaaatatttatttttaaaatttttagtactttgtgatatttatcacaaaagagctgttatgtatgaatttgtttttagccaatttttttcaaaataagcacagctcagtttctttctttttcttatgttaaaatcagttactttaaaggataacaagaatttgacaagttctcatcaacatttctatacaagcataataaacttctattttagtggttcactttttacacaagattgttctaaaaggatagctaaaactataagagggattgtgtagatattttaaaaagcagggcggccatggggggctacttaaaattccattccaaataaatatatagagaatagttatacataaatataaacgtatatattatacaatttcatagtattttatcttatttagtttctatttttaaaatataccaatagactttaattatgtaattttaattcaacaactaatcatatataaggggctgagtctatttaattcttcaccttttcaatccaaacattatccaaggagttctcattcttatatggtgtgtggaaatgggcatggaataggagagaaggagagagggaagactggacagacatttaatagccattaccatagcccaggccgcctctagctctttccaaaccattgtgacgattctgcttccctccaatgactccctaccatcttttggaaaatgatcacaatttctagtttgtttttggtgctgtttgtcaattttgatttggttgatctatttatttgttactgaattcacttgcaagctccatcctctttaacagcatccttcaccactaaaattccaatgcccaccaatcacctctaatatccatgtatgttttctaatgtcagaatcacacacagtttcatacatctttttttattcaagccatgttcagattaaaatggactccttacgtcaaatgggaacctgattcttattttcgaaaaccatctcaaacattattttctttattatgtttccttgaccattggtcactaatttatatgcttctccctcctatttgctaacctcacattattttttttgccaagaggtaaacaataaattacactgcatattaatttctaaatgatgtatcttactcttcccaatacattacccagtgtatgtgtgtgtgtatatatatatgaaatatatatataatatataaaatatatatatgaaaacatgccctttaacaaagtacagcacaatgatgaacatatgagtgcacgtgtcttttgggtggaatgatttatatctttcaggtagatacctggtaattggattactgggtcaaatggtagttctgttttaagttatttgggaaatctccagactgctttcctcagtggctggactaagttgcattcccatcaacaatgtataagcattttcttttctctacggcctcaccggcatctgttgttttttgactttttaaaatgattattctcattggtgcgagatactatctcattgtggttttgatttacatttttgatgattaatgatgctaagcattttttcatatgtttaatagccacttgtatatcttctttttgagaagcgtctgtccatgtcctttgcgtattctttaatgagattattcatttattgctggttgatttaagttccccatagattctggataatagacctttgtaggatgcgttgttcgtgaatattttcccccgttctgtagattttctctttgccctgttgatcatttattttgctatacagaagctctttagttgaattaggtcccacttgtctattttttgttttgttgctatttcatttggagatttagccaaaaatcccttgccaaggccaatgtcaagaagaatatttcttaggttgtcgtccaggatttttatagtctgaggccttatatttaagtttttaatccatcccgagttaagttttgtatatggtgaaaggtagggatccagataaaatcttctgcattgggctagccagttatcccagcatcatatactgaatagagagttatttcccccttaccttgttgtaggtgaggtggttgtaggtgtgtggcattactttgggttttctgttctgtctaagagcattcaagccaggtgcctatcagtggtagattgtataaagaaaatgtggcacatctgcaccatccaattctacacagccataaaaaaaatgacatcatgtcctttgcagcaacatagatagagcgggaggccatagtcctaagcaaattaactcagcaacagaaaacaaaatatcacatgttctcacttataactgggagctaagtattgagcacacatggacataaatatggggacaacagacactgtggactactagaggatggggtgtgggttaaaaaactaccaatcaatcaagctgtgtgctcgctatcagggtgatatgacttccaaacctcagcatcatgcatttccgcatgtaagaaatctgcacatataccccctacatcaaaaataaaagttgaaattctaaaaggtatacagttttacaattataaatgccattcctataatctacttgtttatagttcccccatttttaaccaaatattctcaattagctactttttcttgccctgaatcagatattaagaaaaagcaaataaaaggatatggttatcggtgctacctttttactgttccgaatccctgataagcttcctaggattttgaagtgatttgaaggaaaattttggattgccactgagtttatttacaaaacaattatttatacgtgtaacaacattttgacaaaacatttaaaatcattagagaatggagactcagtactgaagaataagtgttgggaaatacatacatctaccccctaaagaataagcattctgggaaaagaaattcggtagtaagtaataaaatgtctacatcaagactgttcagcaaagtacacataaaatggtacattaaaacgaccttattgaaagttaccaaaaatagcctgaggatgtaaaacatatataaataagcattagcctttttttatttatttaagtaatgttgaaaattgttgatgaattttactcagaatttttaaaacctaaagttttcaaattccccaaataatatgtggatgctgtaaatagtattgtaagggactaaaagagctggaaattatgtaaaatgattttacacaatctacatcagtgtattaatgtccagtataaacttttataatttatttatagatctaaaaagagttccaatgaactcattatatacgtatgtgaaaatagagcaaataacttgtgtgtgattctaaaaattaaaaatccctccaactggccacacacaatccataagctggtgtaatttcatcaaattaagtgctgtattcctgattataatttaattttgatttttaatgtttttaagcattattatttttaatattccaaaactcatttcatagaatttatctcttaaaaagacactctttgcagttttctcttcatagataacaatgcttttttcacagccatcacagacattactagcattacatactttttcttttcaaattattcattgaaaattacaggagattacatgttgtacccatacagctctcattcaattatttctgtaacacatgttgtacccatacagctctcattcaattatttctgtaagcagttttatatatgatgactgcgaacttgagtgaacttaaaaaagttgccaataagtgcattttgtcagggagctgaaagatgtaatgcctttttataatctcataaatactctgagctgtccagagggagccgagacataccagagtaaaagattagaacacaaaagaagtacagtatttattttggggaggtgattttgattcactttgtaacaatcttttaaaagttataattttatgttttattacaatgaagatgaattgatctaaaatattggacaaaataataatacaataaatatgttaatgatcacaaaaacgtaataatgtactagggggcaaaatgaattatagaagaagagaatgcctcccaaaatccagtatctccttatctcaaaactgagcaaaagccaaagtcatatatgagtgacagtaagagcattagtaaattatatggacttcctccatcttcacatgagttttaaaaagatgaagaaaaattttatagtgtcaattaggaatatagcaatgaccaaaaccaaaatttactagctaagaagtgaagaaataaaaaaggaataatattaaaatttttaaaaacttgttgattctggccacagtaaaatgcgtagctaaaagtagaagaatggaaatgatctgaagccttaagccttaatgaagataacatattaaacaaataacataatgttttgtttatttgtttgtttgagacagagtctcgctccaggctggagtgcagtggcgtgatctcggctcactgcaacctccagctcccaggttcaagcgattctcctgcctcagcctcccaagtagctgggactacaggcgcgtgccaccacgcccagttaattttttgtacttatagtagagacagggtttcactgtgttagccaggatggtctcgacctcctgacctcatgatctgccctcctcagcctcccaaagtgctgggattacaggtgtgagctactgtgcctggccaataacaataaattttaaaacaaaatgtttgtacttgctaaaatctaggaaggttttgtataaaagtggagaagttctagtttaaaaaaaaatactgctataagcaacaagtaacaagaagctactctaaactgaatgtttttaaaataatagatttaacaaatgaaataataacatatgtatataatgacttggaattcccaaagtactttcttgcttgagcctaaaagagcattttcattaagataactagatatgtatatcaccattttaccaacaatgaaactgggaatgaaacaacaatattatttagatatttccaattgtattatatggaccacaaaatgggtgaaaaatataattcactctgaagatataaaatgttagaatttccaagtgcatttatatcaactcatctttttatttttctgttttataatgtgcattacatatttcaatatatattataaaatactacctgtttataatttaaaataaaaacacccatcttggaagtggatactcagctcttctctagatatatacaggaaacaattttaaaagttttctagaaggaaggaagaatataaaattcaatcatggttgctgttgagtgtgctgtttatttttttaaattttgaatgaatgtcaaatgatatttttaatcatccttgctaatgaaatttgccatgatttttctcttttttctctaattgatacaattaaaggagtattgactaaacattggaaacctcaaaagtacaaacacttctttcaaataaggagttttaatgtgaattaaaattgaataaatctatccatttagggatgcactacaggtagcaaaaatgcaagaggccccacctggtgtgatgcagaagaaaaacctgttcagagaaatggaaatagtgttacattgtgctcggattgctagtatcagtggttccatataaaattcagtgaattttataacttgcgtaaatcaaaattttcattttcctttttttctacctgtaattacaacacatgcaaatgcgatctgaaagtcatgttctttcaaatatataaagataaatattttggaataatttttttcttaccacccacaaatatataaagaaaacatttatacatatatttctaattatctatgtagtttaactgagagaagtctatcaaagtccaaacatgaatcttaactcatttaaactatttggtaagtaagtttgtgattaacatgtaaggtcttccctgtagaagataggaagttttgttaatataagacatctctcttcacaactccataatgttgaagagtactattttatttcgtgacaagtggcttctgttaagaaatgtaaaggatgctgtttggttttatactggaagaacattatgaatacagtttattctcaatatccccaccatttttaaagccgtgagcatttaattttaaaaaaattatttttgaacactattttgctcacctagtctagtatctgctttgattgattctttctacattctgctacacattgactctttgaactacattttactctttgtatattcaagggaattctatggaaaatgccacaaaacaaacatttaattcatcaatttaatataatatccaggtttataaggaataggtaatcttggtagactgcttgcctaacataacacaacaagaagcgttgtataaatctcagaaatgttaattggtttttaaattagtgcaatgcatttttctttaaaactatgtattatctcagaatgtgtcttccataacgcaaaattttgccataatgttaactattaccagtatgcccttgttaatgtaaatatcatatccattagctcctttgtcgtgtcttttgtaattcaatggatgaaattatataagggaatttataatgctccctaagtaaatatggacttgaagtataatatttctaaagagttatgttaattttattaattctattttagtacattttaggcaacccttctggttctgcactattttattagacagtcaatcaatgtttatgaagcatacatggattaatgttcctttttttttttttgctatgtagctgcagaagtctttagactatccagatgtttgacttcttaagtagctgtcaattctgacctagatggagccctgctgcagaaagatgcctactccacctttctccacaccagaaatgcaatcaaaacaagactaattgactgtgttcttgtaatttttgagaaattgccctttaagtttcagtataccaaattcaaatattaaaaattacaatcatagttttacttcagtaatttacaaagccattcaaatccaaatcagcaatattttaagaagtatccctgtgaagtccaacactgataatacatttcccagaaattggtaaataagagtaattagataccttccaaatttttaaaaagtctctatcccctggaggaaacatttctactgactaaagtattttgcgagaaaaattttgcctagttgttttgcttgactatattaagtaaatttaatgttttcaacattttgacactttatattaagtatttctcaaaccattttgaatagaagttagtgaaactttagactatactcatgcctctcaaagaagatacttttggggtatgttttacaatggataatttctaaaaatattttttgaaactctaaagaacagttattaattctctcaattttctatccatgtatcaaatttatttaattgtaggattaactctgcactatttaaatgattcaaatttgaggtaattttgaagagtatgttttaaaatattcttaacttaatttcacttcataagattccacaaaagtattgttgaattcatgtctattgaccttaatctacaaagcaaactaaaacatcccccatgattagatatcaccaggtagaatttcaagttgcaggggattttttaatcttctttagtttttcctcatatacatgtatgtatttgctatagacttaggccaaaattttccaaatatcatttgatgttagggagtatattgtactacgaaggacgaagtaagaacatataattaagagtcatgtagacttatcaccaatgtggaaagataccgtacgtagtaatatcatcaacaccaatcagagttatttaatgtcttctcttttcatatgcttaacctacttgcctgctgcatccaacaatatctcttatgaaaatagctaccagtattctggaaacagcaaccaatcaccatcttaggactctgacttttttctccatgtctttattgcagctttccacgtcctgaaattaattttcagtctacctggagaagatgatacatgcacatagaaaaaagttaaataaaacattgaactatataaggagtcaaaaagcatggctagttttatgaatctaatagtgcagtggtttttgaaaagctagtattatcaaatataatacatttcatggacaaatattttaatattgcagttgggatttaatttatacaacagaaacatgaaaagacgcatacaatagtccctgctttagccagagatacattccaaaactctcagtggatgcctgaaacctttgatcgtacttaaccctacatatacagattttcctctacgtacatacctatgataaactttaatttacaagttaggcacagtaagttaacaataatatctgttattaaaatagaacaattacaacaattttccagcatcgctaatcttgtgtataagggccattattaagtaaaataagggttattgaacatgaacgctttgagactgacaatagagggctgaaacagctcctaagtaactaagaggtgggtagtgtagataacatagacatgctggataaagggatgatttgtgtccctgtcacaacagagaggaatagcaagatatttcatcgcactactcagaatggcctcaaattcaaaatttatgaattgtatacttaaattttccatttgatatttttggaccacagttgactatagataaccgaaactgcagaatgcaaaactggatgaggagggactactgtatataagacatttgaatgaagcttggattctcatactttaatactttgattttatgtttggctgaaaatttgaatgcaattacaagaagatatggggaaacagatttagaaagtcaatttccaaatttcatggggttagagaaaatgcagctcagagggaaactgattctcacagttgcttttaatagtaaaatataaaccaaatatatttttaactttttatattctaaattatttattcttattcaattatgaagcccatttttcataacagcaatacaaaatgatcattaaagaggaagcttaaagcagaaatataagttagataaataatttacattgatgtttttcatttaaatagttgttaaatagttgtacctccaaataatattaaaggtatatggatattgacatttttctataagaataatacatattttaatgtatttgctgtattgctgtactgtattttatccatatcttttcattactcgttggtgaatatccaagataaaatgttgactctaacacaagtataaaaagtatacaacctggagttaattagtgattcacgtgtacagttctcattttaggggttagtatgtgacttaggccaatgacctctctggatctcagttttcttttatgtaaattagaactgataatattgttttcctaccttataaagttaccataaaatttacaccataagtcgtaagtgtaagtattctgatgatcttaaaaaataaaaaatggatttacaattatttaaattattacttatgctcaggtttgatttcctaagtaataaaccatgattaactaataaaaatgaatgttctggatgttattgtgaaaatacatcattagtagtgcccgaatcttaatgatgtcatttcatatgtgcttatggttttatttgtgaaacgtccagagtacaaatagtggactttttatgccagagtaaattggtgagagaaaataattaaaatacttaacttttatagttgtaacagcctaacctcatgagatatgagaaagtataagcatttaaatacatcctcaaggtgacatttaatatatatataatatgtatatacatacatagaacataactttcaaaagacaaaacttataaacttattatttttcaattttaattttttttcagagaatagtacatttgtatatttgtggggtacatgacaacttttgatacaggcatacaatgtgtaataatcaaattagggaaaatggtgtatccatcacctcaagcatttatctttcgtgttacaaataatccaattatacttttagttatttttaaatgtataattattattgactatagtcatcctgttgtgctattaaatacctgatcttattctatttttaacacaaacctatttgaagttcacttctatcctctgcaatgacaaaaagatacttattttttcataaaaataacttcaagcaacctacgattgtaataagtttataaagttaattttctatatatagaaaaaagtactagctattagtattttagcaattcttcaccataataaaatagggctcctatatggttaaaaaagagtaggatcttaatctgatgggatcaatggccttaaaagaaaaggaaaagagagttctctctgagtctctatcccacaagtgatcacacagtgagaaggaagctgtctgcaaagccaggaaaagagccctcaccagaatccaatcatgctggtaccttgacctcaaactctaaaccaccataactgttaagaaataaatttcttttgtttaagccaaaaaatgaagatgttttacatatataatttttctgaaagcttttctaaagataaaaatgaagcatataattatactagtttaatgctaaaaaggtcacaggatgaaatacttgtcatttaaaagctaactagccaaacctgaattattaaaaaaaaacttactttagcctcaagagaataatcattacttaataagagatagtcttccactttagattactgctgaaaagatgtgcttacagaatagtttaatgtttaacattagataatttttagttgaaatatcatttttataatactaaatatcaattttataatattaaaataattataagcagtacttgctagatttttactttgtactgggcaataagtgctggaggttaagtacattaccacattcacacaatcttctcaacaaacttgtgacctatttttggttgttatttttattattactgtctccattttaataaagaggcacttcagtctgagagatactagatggcttaccccaaaagctaatgatggtaagtgatgaaaccaggcgtttcttactcctgatgcagtgtttttaagaacaaagcaagaatcttcatacttaggaaaggtaaatgggaatgtgtataataaatcagatatattgtcattgatctataggatttattgcctagaactatctgcatgtgagaagaccctaaacgaagtagcagaagagtgatccattcaaaccaataggatcatcatgtgaatgtatacaccagggctaaaccacaattgtatatttttttccaattttttttcctgagctttagttgttgagtaatgtgcaacatatctaaaatgaatacatttgaaattgaagaaaatattgtattttcatataatcaaacatgtttcataggtaagttgatttcactgtattgtaatgatagattcagaagtgagtcatttatatttggaaatggataatggaagaaaatatataccatgattttttttaactgcaaacagaaatcctagcttgcttgatatattatttttgtagcatgaggcaatagttcttttttaattcatgcatagagatatacctttgaaaaactgataactaatctttggaatctcattctacacttgtttattgagattttgcaaactaaaaaaaaatattaaatccccatggctgagaaaatactattctttctctagttattcctcaagtggtttcatgtgcaaagataatagttctgtcgaaaccagaaaattcccggatactagctaagcaattttactaaactatcaccatctaagtagcatgttaaaatttggtataggaaggtattgaaattgacattaatacattattttttttcactaccttgtgtttatcactagtttttcttcatgaaaaacaaaataatttcaataaaaattatacttgcttggacatgagcattctaaatttgttaattcagtgactaagtaattctcatttgccgtatcatgatgacattgtagaagtatatttgcaagtgtgaaccacaaagttgctgggatgaagtgccaggcaaaatcacaaattgaatgattttttttttcaaaactgagctgtttgcttttagaattataagaaataaaaataacttaaacctattttttgaaaaaaaaaataaaataatgtagacatgacactcagtcatcctacagaactagtattcagacaagtctgacatactcaaagtcgacctgctagtgcttgcttttgtatgttagcagttgttctgattcctttggatcactatttcctttggatcactatttcttcaagtcattattaaaatattaaacctaagtttaaaaatatcacataggaaaactttttatacatatataaaacaaatacaggttttatatacatattttttcaggagtggttttctcacagttcaaatttacatctatacccgtatctgtcacttgtgtttcacatcagttacatatttgaacatgcagttattatgctgagtaataaatgcattttgtcattaaaaagactaaactgggctaggcacggtggctcatgcctgtaatcccagcactttgggaggccaaggcgggcggatcacgaggtcaggagatcgagaccatcctggctaacacggtgaaaccccgtttctactaaaaacacaaaaaaattacccaggtgcagtggcgcctgtagtctcagctactcgggaggctgaggcatgagaattgcttgaacccgggaggtggaggttacagtgagccgagatcgccccactgcactccagcctggtgacagagcaagactccatctcaaaaaaaaaaaaaaaaaaagactaaactgttatgcaagctaattcttaacatgtgttaagaatcattttgaatgcctatcaaattatatttcttccttattcttctagataatacattatcaccagtttatttcttttcattgttattattttctgatccatattgttatagctgcggagtctaccctcagattctactacaaacacgtaacacgtgattcatcttcattactacttgctccacttgccatttcaattttatcaatcagaatacttcatcttcttcctattcacctctttcatggttactttctttatgtcttttgggatttcctgcaaccatatgccaaagaaaagtggcttccaccttctcctaccttctcatggtagaaactaacaaaaggtcataaataccatagctataaaatgttgcctttaatctaatatatttgttaaaatattaactggagaaatacaggtgatccatttcttgccaaatgatgattcctaaaatattcataaaaaggtatatttaaatacattctctgttaaaataacgcgctcagaaccatccattttcaagtttaagttttaaaactaacataatctcatatagaagatttatttaacacttttcacagaagttttgattataattttcttttaacattatgatctattaatgggtgtcattttctgataaagtacatttagggatatgataatattcattatcttccccacagggattcaagaggtatatttaaaagaagaggtacttagacactttttctttgttaataaaaaaaaaagaagtttgaaaaagatagtcacataattaacaaatcaattgcttaaaatattgtttgaaaccagggaataggcgtcaacaatcatgaaattgaattctgccggttactatgactttattctgtctcttaaattgaattattggaaaagatttatttttaaaataatcatctaatattttctaatttagaggtttaatactttttttccttttttttttttttttttttttttttttttttactttttaagacacgctgtttaatggtcttgggcttggagcagtaattggcctgggagttgctgcactgctgctaattcttgtggtaacagacgtcagctgcttctttattcggcaatgtgggttgctgatgtgcatcactaggagaatgtgtggaaagaaaagtggctccagtggcaaaagtaaagaactcgaagaaggaaaagctgcatacctgtgagtatcaggcatctacatcatgtcatattaaacaagcgccacagtcaagctcgagtgctttacctgagggcgttgtagggtaaaggagtagggtaaagagtttgattatgcaacattggacactgcactgcctgctctctgaccttgaaactatgtatccttatatataacctagaacaaagtgactttgacaacagtttattcaaaattaaacctcacaatgggatcttcactgaaaagaatcactaccatgatttatagatgataaacatatagatggatggatagttgtgcaaatgtattccattttgatttattccaccggttttgtttatattaaataaaagaaaggcttcaacaataatctgagctaaaaactcagttgaactgagttaaaaacaacaaaattgtggcaacttctacaaacgtaaggcatgattacaacaggcttcatgattttttgtatagaaaatatgatatgtgctataaaatacaatattacagattctgaatatactattctaaaatttgatcaaaagttgattacttgttagaatttggagctctctgtgtagttctatttagttaagcagatataattttcaagaaagtatgtagatcgattttttagaaaattattttgtcctgtaaaagggaaattacaatgttttaatatttccattttgttttattgtgtttgtctttacatagatatagatctaatttcaaaagtagaatatgatcaatgcaaaaaattcagcaagcacaggaaatcatacacaaacatatgcacacacgtttgtgtgttatgtgtgggtttgtatacatatacatgtgtgcattaaacacagcaatcaaaaaataaacagtcttaagagttcaggacattccctttattatttttaaccttaagtcctttctactgcatactttttctgacacatacaaaagtgttgaaagactttaaagcaaacaactagttgggttccacaattaacattttgtgctattttgtcatatgtttattcatacgttaatcccttatattttcttgaatttcaaaaaatcatcacacaacccctacataattcaacttgcatatcattacatacagtctaaaaggtgtttacatttatgtaagtaaagccacagaataaaatgcaccaaatgtttcagttgaagagttttgacaaatgtttttatatgtgtaacacaaagccatatcacaattcagaaccttaccaccacattctggaagttctctcatttccttatccagtccacccacattaacctccctcacccaggccattgctattcctgatttttcaccacagatagtttttgcttattttggaacttcacataaatggattcctgcagtgtctacccttctgtatctgacatcttcaaaaatgttgtattaggaccattcatgttttgtatttcaaggactgatgcttttttattgttgaatcatttatattctttttctatgcatctgttgaagcgtggaaggtctcatactgttttatagacacattttgtcttggctttatcatataattttgttccattgtatcatttacaccttaaattttaaggataattcttttatttgaaaagtttttactttaaagttttggcttttaaaatatatgccaaaatatatatcattttttacatatttctgcattttttgctaattgttttaacatttttactctcatggaagtataatattctaaaaggcttagctattatcagtgtacagtttaataaatattcacaagctgagcatgcccatttttaacgctcaaatcaagaaaaagaactttattatctacgtctcctttcctgtccctattcaatctcgtgctaagcaatatcctgacttcatagcaccatagattactttttcctgttttgtactttacataaatgagtttatacttgttgcatatggggtattttgatacaggcatacaatatgtaataatcaaatcagaataattgtggtatctgtcacttcaaacctttatcaattctttgtgctaggaacacattccaattctcctcctttagttatttgtaaatatctgatacattatttttggctgttgtcaatctattgtgacaccaaatactgaatcctattcattctgtctaactgtattttcatacccattaactgttcctacttaatcccccattcccccttccttgttacctttgctagcctctgctaacaattattcttttctctttctccatgagtttaagttgttgttgttgcagctcccacatatgaatgaaaacacacaatatttttctttctgcactgacttatttcacttaacataattttctccagttccaccaatatttccacaaatgattttccattgtgtatttagcaaattttcatccattcatccatggatggacacttaggtcaattccagatcttagctattctgaatattgctgcaataaacatgggagtacaaatatctcttgatttttttaaaaatttttgatatataccaagcagaggaatcactggatcacatggtagtttctatttttagttttttgaggaagcttcatgctgtcttccatagtgacagtattaagttacattcccactaatccacaagtgtataatggttttcatttcttcacatcatcatctggattcatctttgcctgtcttttggatacaagccattttaactgggatgagatgatatcttattatggttttgatttgcatttctctgatgatgatgctgagcattttttgtatacttgctgtctacttgtatgttgtcttttgagagaaatgtctatccagatcacttgctcatttttaattggattatttgttttgtttttttcctgttttgtttgagatgctcgtatatactggttattaactccttgtcagatgggtactttataaacatgtcctcctattctgtgggttgtcacttcactttgttaattgtttcctttagtgttcagaagtttttcagcttggtgtgatcccatttgtccatgtttgctttgtttatgcttgagaggtattactcaaagaaatttatgcccagatcaatgatctgaggtgtttcccccatgtttactctagtactttcatagatttggtcttcgatttaagtcattattctgttttgatttgttctttgtatatggcaagagataggggtctacattcatcatctatatatggatgtccagatttcccagtaccatttattgatgagacttccctatctccaatgtcttggcagctatgttaaaaataactctactgtaaatgcatgggtttatgtctgggttctctacgccatttcacttggtctgtgtgtctgtttttatgccagtagcatgcttttttgtttattatacctttgtagtataatttgaagttaggtaatgtcattccttcacttttgttcttttgagtcaggatggttttggctcttgtgggtcttttgtgtttccatatacattttacgatctttttttctatttctgtgaagaatgtcattggcattttgataagaattgcattgaatctgtagatttctttgagtagtatggacattttgacaacatttattgttttaatccaccaacataaaatgccttttaatttttgtgtcatcttgaagttttcatcaatgttttatcgttttcattgtagagatgttttacttattcacttaagttaattcctaggtatttcaatttatttgagcttttataaatgggattactttattggtttctttttcaaattgtttcctgttgacatgtggaaatgttactgattattgtacgttgattttttatcctgaaacattactgaatatatttgttagttctaatagtttttttggtggagtttttagcattttctaaatataagatctgtcatcataagaaggattatttgactccttcctttccactttggatacattttatttctttatctttcttaattgccctggctaggacatccagtactacgttaataccagtggtgaaagtagacatccttgtcttgttccagatcttagaggaaaggctgtccatttttcctggttcagtatgatactagctttattatttattttcttctactaattttgggttgggttagctttggctcttccagttctttaagatgcattgtaaggttatttagttaaagtttttctgctattttggtgtaggtgtttattgctgtaatatgccactcagtactacttttgcagtatccaataggttttggtatgttgtgtttccattatcatttgtttcaataaatttttaattttcctttttaatttcattgacttaatggtcattcaggagcatattttttttaatttccatgtgtttctattgtttccaaagttcctctttttattgacttttagtttattgttttccgttgtcagaaaatatgcttgatatgatttcaattttttggaatttttcaagaattgttttgtggcctaacatacgatctattcttcagaatgtttcatgtgctgaggagaagaaagtgtattcttaaaaacgtggatgaaatgttctttaaatgtttattaggtccatttggtctatagcatattttaggacttatgtttctctgttgattttctgcctggatgtcttgtccaatgctgaaagatgggttttgaggttcacagctacgattttattaggatctttctctctaggtcaaatactatttgcattatatatcaaggttttccaatgttgggtgcatacatatttataattgttatattcccttgattaaccaacccctttatcattttataatgaccttattcatctatttttacagtccttattcaagcattttagtcattttctattaggttgcctttcttttccttactgttatgcaggtgtgttcttttatacaacatgctctacatatataacctgggctatacatataaattatgtatatacaatttattataagtatacataaacctatatatggtataattaaatttatatttataataaaatatttacatatgaaatataattttacatataacctcttttcttatttttttaactggcaaaatgttgtctctggggaggctgaggcgggtggatcacctgaggtcaggagttcgaaaccagcctggacaacatggcgaaaccccatctttactaaaaatacaaacattagctaggcatggtggtgggtgcctgtaatcccagctactcgggaggctgaggcaggagaatcacttgaacctcggaagtggaagttgcagtgagccattgtactcctggctgggcaacaagagcaaaactttgtctcaaaaaacaaaaaaaaaaaaaaaaaaaaaaaaatgttttctctggtgaacagaagtgcctgatcttcatgtagtttaatattttaatttgtctcttgtcttattttttaaatatttgcctatcctgaggtcagtaaggccctctatattttccactaaatctttatcatttcgcattttacctttagacatacaatatacctgagttaggactccacacacttttcagttagtattttttaaattatgtttagaaaatagcactagtaattttagtaattgaaaatgtcattcttttctcatgaatagcagtgccatggttgtgacatctcagatgacagaattcaaataggcctgtttctgttcttcttattctattccacttttcactttctctatcctttcaccaatgccagactttattaaccactaaatctttgccatggttgttttctaactgatagaataagttctccaagtttgttgttcttcaagatcgttttgctagtcttgactcacatatccatttaaaaaatttaaattatttatccataaaaaaatttgcaattacaaattttaaaaatgttacaatttgtattgggagtgcattaattttgcagattcattgaaagacaatcaatatctttgcaagataaactattttaagcaacaagccaataataacttgtgtgagctttgtaaataatctagatttacttatgaagtgaaatttttaaagtaccttattctttcacatgcagtccttttgggttgctgaatatgtttaagcagatggtgttctgcacgagtccaaagagggctattcatgagggtcatgacaccacttgacttgtgagaaaatgagtgcagtaaccttaggaccaattcccttacttcagtaaagagttattcattagaatgcattataactaaacaataaattttttaaaaaatgtttctacctataaccacttgtcttaaaatacatgtactcatgaaacatagtgaaatcatcaagatagtctctaaattttaaacataattatttttattttttgttagaaccaaagcaaattgctttcctaacaagatattatctctaatgtactttttaagtttgaaaaaatgctgacttttcccaattctcatttcattgaataaagtaatttcgatagaattaattcagtggaaaatttaatttactacctgtaataccataattaaaatccaatatattatggacattcaccctgggtatgaccatgaactaatactgataagacactataaacaatgacagcttaaacccgtgtaaagtactgtataatgaccacacttagctagaattaactgttgggtttaggtgtttgaaatcttcttattaaattttatcatttataactgaagaagacggcaattttagagtttttgtattccttgcctataaaaatagaccatgggccatgtaattttaaactttctttacaaatctaaaattatgtcactccaattatgaattgttcagtaaataactctacagttgttaagatctcaggattttgagggagccacacagaagcataccgtatgtccatgtatcgaatggaagtagaaatgacaaaaacacaagttttagaaaacaaaaggaacaaaaggcatcctacccttgcaattactccccaaagaaccacatctacagtttgtactctttcgtgtctggcttcttacagaaaagcttgtattactcacaaaaggagagtaaggtctacagtctctgagaaataagaataaaaatccttgcacaggcatttcataacatcagtgctaacaaatggagagaccattgagataaaaattagtttggcaaataattattagtttgggaagtaatatattttaataatctaattataaaagtttttttttcaattctaaggcagaagtaatcattacttttcttaaaatgaaacgccatatgccaactgagatttatttttcaaaattgaaaaacaaaggcttttaatccactttttaaatattgaaattcttctgaatttctatgtgcctaaaattcaagaaacttaactgttaaatgttcctgtaatatcacattttattttgtataccagtgtttttttctcttctcttttttcgaatctggctctttctattgagaaaatctagaagtcaaccatctgtattttttttccactttcaacttcctccctcactgcttaatctcttctatttttggcttatgcttcactaaagctgctcttttcagtcgagagattttatgttgatcaaatctcatgtcttactttggttttcaaattctcaaaccatcttggagaatgtgatattgtttacatgttccctcaccgacattctaccatccccttccaagactctgtatcatcttttttctctgtgtttcctcctcagttctctttctttatgtataatttatcccataactccaaatatcacctctacatgtgtgaataccaaataaatgtctgcgtctggtccttatcattctcttgggcatcaggatgcctgtgtgtgtctatttctaaacaaaatggcagtaattgagaatgtctgaaatctaacttagagtgattactcccaaattattttctgtttctgtggtcctcatctctgtcaatggaataagtatatttccagttccacttcaattccacttcaaatgcttctagctcaataaagattttctatttcatcaacttggctaaaatcctgttttatctgtgtactcctgtttcattccatttgtcatattcttatatcctttattacatatttttatattcatttcttagcattgttttaaataagccattctgaataaattacaagctcattgattattggcattggctcatattaacattaacattctaccaaatggtctttttctgtcacatataagaagacactagtttcttccttctattctgtagatagtatgcaaggaactagagggatagaaagctatgtgttcttcttgtgatatattgttttcaaaacctaactcaaaagtctcatcagttttccctcagtaagtactgacttaaaactttaacacagccaggggcggtggctcacccccgtaatcccagcactttgggaggccgaggtgagtggatcacctgaggtcaagagttcaagaccagcctggccaacatagctaaaccctgtctttactaaaaatacaaaaattagcttggcgtggtggtgcatgcctgtaatcccagctactcgggaggctgagacaggagaatcgcttgaacctggggaacgaagatggcaccaatagactccagcctgggctacagagcaaggctccatctcaagaaaaataaaaataaagtaaaataaaactttatcaccttgtaagagagtaccattttcagcctatttttaagtagctgtgaaaagattccaagaaccagtggaaaaataaatgagcttgaatcccagtacacttggagaagtcattctgacttctgtgaacatttgtttctttcttcataaaatgagaatttacagttctgctccacatgttgtgtgacataagtaaagaaatgcatgcaatatatgtaaaattacccttataatgcctggcatttaataataatttatgcatcagggttagaaatacaggagaatcgattcttcctagctacattttttttacatcaccaagcctttttcaactttactagattgtttgtctatgaccatttgttatgtatgttctgtaagggatatttttacttcatgagatgataattagataacatatttcagttcaaaaattagattcaactgttctcaaacaaaatgcaaactgcatatttattggacatggaataaactaaagaacaaacataaattagcctctactgcacactaaatgagatacaaataagagacatggtaaatacagtggaatcaattcatttccaatattttttgctttcttcgtcattgccttttatgcctcctaataattttctgtacttttacattgtcttcctaactaaacaaacagatcacaaagcttagttttagttgttttatttaaatagaggcacaagataaaaacacatagaataaatattatatataataacatcattacatatactatatattatgctattatatataaaggtatagatagagatatatattaaattttataagtcttctcttttgcccatccactgagcaaatatttatggaataaatgccaggttataagcacttttatagaacttaggaacaaattagtaagcaaagcaaacaataattttgttcacatggagttcaagttattgtggaagatggcagttaataaacgttaactaaaaatgaaatgtccagtagtgataagcactaaatgaatgaaaggcaggatgttaagttgttatttgatactgtgtcataaatacctctcagggaggtgacattaagcttaagggtgggtaataaggagctggtaatacaacaatcaagggacagaacattctaggcaggtgtaaattaatgtaaagattctaacatggggatgagcttgctatgttcaaaggcaaatgacgcttattggtgagagtcagagaaagagaaactggtataaatatcagattgggaaattatctaggggccaaagtattattccatcttcttgggtcaatgaaaagggtctgaattttgtttgaaatagaagactactagaagagttttaagaagatgacttttgctattgtgtgaagaatgggttattggacataataggtttaggggaatgatttaaaatcagggagcccagttaagaggagcttgaagtaatccagatgaaaaaagttggggttttttggcccaaggcagtggtattacacttatataagagtgagtatatttcagatatagttggggtagtgtcaatcacctgattgattttatatttggattagggaaagagagaaatcaaaatgtaccttcatgatgttgtttggttgtgcagacaaccaggtgtatgcagttgtgctgtttatttttatataaccctgttatttgttaatttgtccaccacacctctgtttttaaaacctgctgagtttaattaaccttaaggaattgggaaaatgaaaatatgtggttaattccatgcttattattgatcacacaatttttatataaatttcttctgctttggaaaaacagatttcagctcttttcaaaaatgtagtgttcaagtttgaaaaagatataaaatcttaatgaggaatagggttaactgatttgactgttcggatttatactatcttttacacatgatcccaagcattctgagactagctctttcatgttttcaaaacttatgactatgatgatttattaaaactgcattaattacacctaaagcatttttgttttaagagcatctcaaggcagagaaaaaaaaattaagatcagtgtcatagaggatagtattagtgtaaagttctattttaatttggttcttatcaatttaaattactatatatcttacattctcaagggtttttcttatcaaaatgactaataatactttttaatcaaattatctttttactgttatttactcaagcataatttactaagcattaatattaaaaatatttattaaacatctatacaacaagagacaactctaacttctgtgaatacaacttgtgaaaaagcagactcattcctttctatcaggaaacttttattctggcaggaaccacattttaatttaaaaaaatcaaatgataaataatttttataaatgttatgtaaaataaataatttacctactcatatttatgtaagcaagttgtgaagaactaaagcataaggaagagtaggaattaactagctcgtgtgtgtctggtggggtgtgtggaagatggttcttcaggcagagggaatggactgtgtaaaaggctttgttataagagaaagtaagatttgatacaaaaactgaagaaatatgtatgaaatatcaattgtattttctgaataacagtgacaaaacaaaccaaaacaatactcccggttttcagcccagcatgcaaagagattaaaagttgccactctctcctaacaaaccaaaagctaaacaaactgaaatcaacaattcttagattcataagaaaaatgtggtgttagtgcaaactaccgtcctgaaaattgaagaggcagagaggcagatgcagaaaatcacaacttatcagagcagaaacctgtaagcagaaacgtctgtgagaaccagttcaggaataggaaaaaaatgtaaaatgttattgatgaattggtagaggctcgatgtggacaaatctgtgagttgaaaactccaggatgacttagtcataggaggtcctatacttctgagaattttaccttcaggagcttaacctagttgttacaatgattattggagaagtatctccttatgtttctggaaatagaagggggaagtaactacattaaaatatatcagaccattctgttcttaacaaagtctactctcagaagaaactgtttaaccagagcctaacatggggtttttaacagagcctaactgacccggagaatggaaatagccaacaccacccggctctatgtttccccctggaaatccccaactccagtccactctattcattctgtcccaccaaggctgtgggaggatctgagaaatgcttgtgaagtttacagccagaatcacggactcactaaaggactgagacctaatcatgggatgatagtctcttcttctgccccacacattacctccaaattactaaaggcctattgattatatttacccctactcagtatgttatgtccagctgtcaggaaaaaaattacaaggagtactgaacagcaaaaaacacagtttgaagagagaggcagcattagaaccagatttagatatgatggcgatgttggaattatcagactaggaatttaaaatatcgatgagtaacatgctaagaactctaacaggtaaggtagacaataagcaataacagatgtgcaatgtatgcaagcacagagatgaagattctagaaaagaggaatgtctttgataggcttattagaatagaaacagctgaagaaagaatctctgagcttgaaggtatctcagcagaaactgccaaaatggaaaggcaaagaggaaataagaaaaaaaaagactcaaacaaacaaataaactaacaaaagaaacagaacataatatccaagaaccatggagtaaatacagttataatatgtgcatattggtcatattaaaaaacaaagacagggagaaataaacagaagaaatatttgaagcaataatgacagaatttcaccaaattaatgtcaggcaccataccatagatccagaaaattcaaatgtgtaaattcaaacatgtaaaaagaaaatgcccacatatatacatcatattcaaactgcagaaaattaatgtgtatatatcaatatataaatatagatataaatatattattcatattcatatatatgaatgaatagtatatatattttatatatgaatccatatacatgaataagaatatatatgaatactatatttatatataaatatgaatatatatgaatgaatactatatatatgaatatgaatatatatgaatgaatgctatatatatgaatatgattatatatgaatgactattatatttatgaagatgaatatatatgaatactatatttatatataaatatgattatatatgaatgaatgatatatttatacatatatattccttatctatatagaatactgaaaggagcaagagagccagaggtaaaaacgcccttactgatggaggaaaaataagttttacatctgatttttctgcagaagccataaaacaagaagagagtgaagtatttttagtgttgagagagaaaaccccgctagtatagaattctgtctctgtgaaatgtgaaattatccttcacatgtgcagcagaaagaatatcctttctcagacaaacaaaaatagagggtattttttgccaatagatctgacttgcaagaaatgcttgaacaagttctttttttctttttctttttcttttttttttttttttgagacagagttttactctgttgcccggtctggagtgcagtggtgtgatctcggcccactttgacctttcccttctgagattcaagcaattctcctgcctcagactcctgagtaactgggattacaggcgtgtgccaccacgcctggctaatttttgtatttttagtagaggcggggtttcgccatgctggccaggcgtgtctgaaactcctgacctccaaccacctcggcctcccaaagtgctgggatttcaggcgtgagccactgtgcctggccctgaacaagttcttcagagcagaaaaatgctttaaactagaaactcaggtctccaaatcatttgatcatttttaaattggacttgtttatgttttgttgttgttatttgttgttgtttgttgttttgctattgaattgagttccttaatatatcctggttattaattccttgttaattgaatagtttgcaaatattttttcctattctgcaagttgtctcttcactttactgatggtttcccttgctgttcagatccttttaagcttgatgcgatcccatctgtccattttttgttttggttgcctgtgctcttgaggtcttactcaagaaatctttgcccagaccaatgtcctgaagaatttccccaactttttcttctagtagtttcacgggttcagatcttagacttaagtctctaatcaattttgatttgatttttgtgtatggtgagagataggggtctggttttatgcttctgcatatggatatctatctagtttgcccagcatggtttattgaagaggctgtcctttccctaatatatgtttaaagaaaggaaatgcatcagagaaagactaagtgaaggtaaattaaaaacttttacttttcttattcttattcataagattattgaaaataatggaaacaatgtattgtattatattatgtgtatatactacgtataagataaatgaatggtaacaatgatataagggatgaaagacttagaaataacttatcataaagaactcttgctacccattaagaagtacagtgttatttgaaaattgacttcattcagttcattgtaaatgtatattgaaaattcttgaacaacaaataaacaagttaaagaaagataactgatatactaaggaaagaaaattaaatcatataaaatgctcaattgaaatcgccaaagacagaaaaatagtgaaagacaaaaactgaaataaagaataagggcaacaaataaaatagttacaaatatagtatatatattaatccattgtatcagtaattacctgaaaattataattatctaaatagctcaattgaaaggtagagactgtcagagtaaataaaaaaaaacgagacccaaccagatattgtccacacacacacacacacacacaataagaataatgacacgtgaattaaagataaatagatagaaaaagacatactatgctaacatgaatcaaatgaaagcaggaatggaaatattgatgccagatgcagtcaacttcagagcaaggaaagttatcaggtttctaaacgggtattacctattatcaggtttctaaacgggtattacctaatcataatggggtcatttctcaaggaaaatatagtgatctttaacatgtatatgtttaacaacaaagcataaaaatatgtgaggcaaaaattaatacaacttaatgagaaatacaggtgtccacctttatagctggagactttaacgctgccctataaggaactcattcagcaagcagaaaaaaaaaaaaaaatggaatacatgaacccaggaggcagaggttgctgtgagctgagatcgggcaattgcactccagcctatacaacaagagcgaaactctgtaacaaaaaaaaagggggtgtggggggagaatacaaagataaaaagaaaaaaagtaagaaaaaatgggaaaatttgggaaaaaagagaaaaaaataaaatcagtaaggacgttgcttaaccaatcaagttcaatcaactatatatgtcatctgtagacgaattaatccaataacagcagaatgcatacacttctcaagcttgcctagaataggcaccaagatagatcacaccctaggtcatatgacacactttaaaacattttataaataggaatcatactatgtctgctctcataccacaatggaattatactacaaataaataaaagaaagctagaaaatactccaaatgcttgaagattaaacaatgtacatttaagtaacacataggtccaagaaaaaatctcaaaagaaatttttaaatattttaaactaaatgaaaatgaaaacacaacaaatcaaaatttgggggatgaagtgaaaccaatgtttagagggaaatttccttgaatacatatattagaatataagaaagatttaaagtgaattatctagacctctacctcaggaaactgagaaaagaagagcagattaagttcaaagtaagcagaagaaaacaaataataaacattgtagaagaagtaaatgcatttcaaaacaaaatcaatagagaaaattaaaactgaaagctggttcttttaaaagattaacgaaattgctaagtctatacctaagctaactcagaaaaataaaagaagacagagatagagaaagaaaatacacaagaatatcagaaataaagaaggaataactactatagacagcattgtcattcaaaggataataaagtaataccatgagcacctttatgccaataatttgataaccaaagtgaaatagagaaattcctcaaaaggcgcaatcagctaaatgtcacaaaggaagaagcaatctgaacagacctttatatccatcaaacaaattgaattaataatttatagtctccccagacagaaagcaccaagcccagacaagttcactggtgaattctaccaaacatttaaacattaaattatatcaattatctacatgttatttcaaaagatagaaatagagagaatactttctcattctatgaagccagcattactgaaatgccaaaaccagacaaagatatgacaagaaaaccacaggccaatatctttctaaacatagatgcaaacaccatttacaaaatattagcaagtcaaatccaacaatttataaataaactatatatcacacccaagtgggatttatcccaggtatgcaagtctggttcaacgttaaaaaatcaatgtaaatccaacacttcaagataataaagaaaaataatcataaaatcatattaatatatacataaattatttcacaaaatttgatacccattcataataaaagctttcaataacaatgaggggtggaccttccttaacttaataaaggatatctaaaaaactacaacttacatcattttttacatcttagtgagtaactagaagctgtccccactatatcctctctcactaattcttttcaacagtgtactggaagaactagcgaaagccattaagacaaagaaaggaaataaaaggcatattgattgggaaggaagaaataaaactctctttgtttgcagatgacatgatagtctatgaaaaaagtctgaaaaaacacctgggtatagtcaatgattatagcaaggttgcaggataaaagattaatatgcaaaaatcaattaatatgcaaaaatcaaaagtataccagcaataaacaagtgaaatttgaagttgaaacaaaattattattttaattagcaccccgcaaaattaaatactcagccgtatagctaataaaatatgtacaagatctatatgaagaaaactatgtaacttatgatagaaaataaaagaagaatgaaataaatggagagttatttcatgttcatggatagaaagactcaatatggacaagacatcagctcttcccaacttgatctgtagagtcagtgtaatcccaacaaaatcacaagtcattatatgaatattgacaaattgattctaaagtttattacatagagaggcaaaaagacccacaataaccaaagtaatattgaaagtgtaaatgtgtaggattgacactatccaacttcaatacttactataagctacgataaacaagactttgtgatattggccaaagagtaaacaaataaattaatggaacccaataaaaacctcagaaatagacctacataaatatactcaagtaaactgacatgtcacacatagttaaggcagtactatggtaaaaagatgttattttcaacaaatggtactggaacaactgtaatccataagaaaaaatatatctagccacagacattatgcacttcataaaaattaactcaaaatgtaatattgacctaaatataaatcaaaaaattataaaactactagaataaaacatggcagataatctagatgaccttggttttggtagtgaatttttggattcaacaccaaaagcacaatccatgaaagaaagattttttttttttttttgagatggagtctcgctctgttgcccaggctagagtgcagtggcctgatctcagctcactgcaacctccacctcccaggttcaagtgattctcctgcctcaacttcctgagtagctgggattacaggcgcgtgccatcacgcctggctaattttttgtatttttagtagagatgaggtttcaccatgttagccaggatggtctcgaactcctgacctcatgataagctggactagtataaaattaaaaatttatgctctgcaaaagacattgttaagtgaatgaaaagacgaatcacggaatgggaggaaatatttgcaaaacacataactgacaaaggactattatatgatgtatacaaataattcttaaactctatataataaaaagaagagcccaattagaaagtgggccaaaatacttaatacatacctaattaaagaacatatacaaatagtaaataagcttatgaaaagacatttcaaatcctatgaatcagggaaatgaaaattaaaatgagctactgtaccactgcaagcctatcgaaatggtcaacatctagaacattgacaacaccaaatggtagatgtgaagcaacaggacatctcattcattgctgatggaaatgcagtgatacaatcactgtggaagacaatttagcagcttctcaagaaaataaatatactcttaccttaaaatttattatttgagctccttagtatttacccaaagaagttgaaagtgtatgtctacaccaaaaccgcacactgatgttttcagaagcttgtttcataactgccaaaacttggaagcaattaaaacatccttcagtaggtaaatgaataaactgtggtagatcccagcaatgggctgttattcagcactaaaaaggaaagagatagcaagccacgaagagacatggaggaaacttagatgattattactaagtgaaataagccaattttaaaagactacctactttataattccaactatatgacaaatatagttttgctttgagaaaagcaaaagacactaaaaagatcagtggttgcacatgttggaaagaagggaggaataagtaaagggagcccagaagatttgtgaggcagtaaaactattctgtatgataaaataattgtgagaaaatgtcatgataaacattttcaaacacatagaatgtacaaccccaagagtgaaccttaatgtaaagtataaatttggggtaatgatgtgtcaaggtaggttcattgattgtaacaaatgcacccctctggtgggagatgttgctaatgggggaggctatgcgtgtgtgggagcaggggatacgtgggaaatctctgtatctccctctcaattttgctatgaaattaaaactggtctaaattaagtctatacaaatggaattttaaaattattctttgtagtttataattgctgggcatcatagcagaatgttttcctgatgttaaaaaattacaatgtatatggttaatagtttgtaacagtgaatacctgtacgtgggaaagtcaaaagactaaaagaaaaagaaaaacattaataaacaaggtttaccttctagtagacatattcacatgtgtgtctggaaatatttatcattactccatgacaaccacacatttatcacctgaaagactggctattatactgaattacactaatctaaataataaggaagaaacaagaagaatcatagatgttggggaaaagtgaatatacagaataaaatctaaaagaaatataattatataacttcaaatattccagaaaagaagttatatacttcagcactttatttctaaaccctgggaaacaaatggcacacagattacaaaaaacgagtgaaattttgctgttgtctatttggcatatttgaatcattttcatcctttctataatatgtaaaatgaaaatatcatggttgattcataaaaacacagatgaatgaggtcttattggatgttcagtcctaatctccttttcattcatccccccttatgaaagtatcatgacagtaggatccaatggttattgtgagtgaaatattacatgaatacccgctcctcaattttagctatatacatgggcccaaacttgaatcacaagcaattaatcagaaaatctgagaaagtaaagagaatatgaagtcacatgatgatacctcctatccaacgcaggtataaggaacatgaaattttcaatattaaatttgttttgggatgtgttttatttggattatttttgcatatccttccattgcatttaagttaaaattatttgcaagtaagttattctacatagtagagttaaactttctattaattatgcattctgaaataaaacatagaatacatcaatattttaaaaaccttacagccatatttgtattttaaggtaaccacagtatacccttttactcttcccttttctaaactaatcattctcgaagctgttttcatgatttattaattgcatgaaatccttacattctggcagggtgtgcttattaattaatcaataatatcacctctcatgatataccagatgacatctgacaggggcagagtgcatggacatttactgtctttaatgtggaaactctctctctctctgtgttaatattaataaaacataacatagtattagtgtttctttaagtaactaaatattttagttacaaaagcagtaccaacatatataatttatatttaataatatcaccttttatgatagactggatgacatttgacaggggcagaatgcatttagacattcacagttttaatgcaaaatctctccctctctgttgataaaacataacatatattagcgtttccataagtaaccaaatattttagtttcaaaagcagtatctatatgtaattttatatttaattaaataaaaatatatatactttaaataaaattatataatttaatttaatttaattatatataatttaatttaatttaattatatatgatttaatttaatttaattatatatgatttaatttaatttaattatatatgatttaatttaatttaattatatataatttaatttaatttaattatatatatttaatttaaattaattatatataatttaatttaattatatataatttaatttaattatatataattaaattaaattatatataattaaattaaattaaattatacataattaaattaaaatataatttgattacattaaattatatataattttatttaaacactcaaaaatcaaagaaatgtaaaaagtagaaatcaaagaccttaatcaatactgatcctatttgctgcctcatacataagcattaatatttttttccttccttcccaataattttccatgtggtctatagtttgtaaaaaataatatcctaggatacacacacactcacacacacagatatttctatgtactacatatatacatatataaattttagcaaatttatgtcacatagaaatgcagctgcaataatgttccatttcagcacataaatctcttcctcattcttttcataaatgagtagtattccatagtgttagatataataaagtatttctctgcttctttattgttacactttagaagaaactttcaatatttttataatggactgttctgttttgaatatccatatatataaattttgtaaatatacagtaagatactagatgtagaatggaaggccaaaactgaaaaattctggcaaattgcccacagaagtctattccaattcatggctgcaataaaagcaaagaatgcatatttctctacaacttctgacatattaaatatcaccaatttattttttgacaatctggtaagtaaaagtttttattttgatgttatttaagatttgcatttgtctatttaggttgagtctgagcttgtttctttttttggttactttgttttaattgtcttttaatatctttacacactttcatagagttatttaaccttttctcttacttgttgcttatatcatgtgccctataatcatttgattttgtattacttgcaaatatttatttatatgatgctatttattacatgaaagtttatatttttatctgcaagtttatgaatttcataaatttttttcagtgttgacattttcatttttaaaaaatttcttaaaattgaaagtttcagtaatatatttccaaatgtaaattctccatgcatgccacgacagtgatgcaggtaacactgattgagtgtggcacatgcatcagctattacaagtaacctacaggaattagtttggcactattaccatctttgttttattaactaagcaattccgaaggatggggagttttatgcaatgagttagtgggagagccagctaatttaggtctgaacacctcccttaaacattatgctatgcttgttattatttcctatttaatagtaagttctaaaatatggcaggaatttatataatgttaaccagtctatacattgtgaaacttatccacattacattttgtgactattttgacaaacaattgcctcatttactctttttaattctacagacaatatcaataatgattctggtattacttaatataacttacacgaggtcaggagatggagaccatcatggctaacgcggtgaaaccccgtctctactaaaaaataccaaaaaaaaaaaaaaaaattagccgggcgtggtggtgggcgcctgtagtcccagctacttgagaggctgaggcaggagaatggcgtgaacccaggagcggagcttggcagtgagccgagatcacgccactgcacaccagcctggacgacagagcaagactccgtctcaaaaaaaaagaaaaatattatatatatatcttacaatggataggagattcgacatgtaaattatgtgtgtttcaaatatagccaaccaaggttaagtaaaatattcacttgataatacttatggtatttattataataaaaaagttaaaaataacctaaatgtttgtcagttggtaactggttaaatatatggtggtacatacatacaacagcatagtatgcagcatgaaaaaataaaagacaactctaaatattcttttatagattatagctaaaactcagtgttagttcaaaaggctcaattatatacagttagtatattatttgtgtaaaaataactgtatgcatttgattcatatgtgctgatatctgtgtagaatgtctctggaaaaaaattaatgtaataaaaattaaaattaaaaaggtcaccaaaaacaaaaataagaattgtaaaggctactaactaaccattttctcttgttaatcttgaatgtcctttcagtaatatttaattatttttaatttaaagatatttgtttgcatattaattcttagtaagaaaaagaattaaaatcagaattcactagttctgtcttctctctgcattgtgctttagttcatcgtatatttgtaccaattgttaatataagaaaatgtttgaatcattttcttgctaagaatcatcaatagccacatttccacaaatagtatactcctgtatgtcatcacaaacactggcataatgcagaattttttaaaagaatcaattgaagaataatgaaaactaacacacaaacagaccaaacaacattaagatccagtggtggtgggctcttcatccatctttacttactctgtagatcttacttacttggggcccttgatcagataatgttgctaaatctgtgtgaatcactgtctcttacagacatctgattttcagagctaaaaaagtttattcacttctagatttcttctattcttataaacacccattcttcaaattatgatgcatgtgtatgtgaggtacctacatactcagataagaggaatgatatggaactgtgatctgatcaaaagtgttttatatccttagtgtttttttctatataagtctcagcatttgtagagtctgttcaatctttggaccattgtagatttgttgtttgcttgctttttttttttttggtaatcctagtgtatatgcttcctaagagcaaattttaatatcctatatccaccattatgataagaaacataacagtttccctgctctgaatgttctaaatgtcccacccttcctctagtccctggcaactacagactttattattgtcattatgcatttgtcatttccggaatgtcatatagttggaattagaaagtatttagtcgtttcaaactgcctcagttgccttagtaaatatatttaaagttctatatattttcatggtagttagctcatttattttttattagtagtaattttcagttttaccgatggaccacagcttacttacccattacctactatccattcacttattgaaagacaagttggttacaatttttggcaatttataaatagtgttactgtaaacattcatatgaagactgttgaatgaatacaaattgaagtccccaacccttctttagttttttttttttttttctgtacctatttgaaatctttattaggagtacctcatgcccaattcttctgtctcactttactccttgtcatcaccaaataacttccttgttactctttttttggttgttgttcagttgtgaggcatgaaacattataataagttttctagttttcatcaattgtgaaaaattacattcactgttatatattcaaaatttgataaagacgacattggaggatgaagttataaatgaaaagatatgcatatatgttacaaagattattttatttaaactattttcttgaaaaacgtgaataagttagaagtccataatcattttatagttaagatctttcatacaaatggatagacatatttaaaagaagacaacacatacaaattttgtcttctaaattttgaaataaaagcaacccttctgaagtatttcaaatattttaaaattttaaaatgttttcttttttattattttaaaaatgttttgaaatattttgatagtttcaaatgtggctagttagaggaaagaaacctacttgatgctgtacattttattaacaaaatattttcatttttttcaaaatagaatatatacagtaggattttaaaatgtgtaccaattttgcaaaataattgatacagttttgatgagaaaatctatctagaaaaaatggaatttcttcctttttttctgagtgataatatatggtgaaacaaatttaaatggtaaagcatttctcagtggttttcttaaattaaccaagttggatttatttggaggaaggtagaattgggtgattttaaactctgtttttttccataatgcatccatttttaaattacacaggtgagatgtttctctttatgtttctaggaaagatggatcaaaagaaccaatagtggagatgagaacagaggatgaaagagttactaatcacgaagatgggagcccagtaaatgagccaaatgaaaccacaccactgacagaacctgagtatgtggcttggagtgctcacttatgttcaaatgggtattggcaaaatgataacacattattattgttgtattacatatttaaatattaattatttgtaaaagaattgtgcttttacttttttgatgaaagtacatgtgaatatctaaaatccattttctaaggagacatttttcatgaaaactttgtatgaatgtcagagaaagtctgttaaaccatatatctgtaatttaatgcaaaagtataaaaaggtaagtatcttacagagtttgaggttttcaacaatagtctgtctttttaagatagtgttgttttctctttcaagataaaataattatatttactgaaataaggacatgttaggaaatttgtcatcgctttgaatataaatgtcattgaaatatacgcacggctattttaaaaagaaatatttgtgcagaggagaaaataatattaaagtgtttatcattgcaatatctatgtagtaaatgatgcttggtttccattcttgatgttatttattttgcatctctaatagctctgttaaaactatagtagatatcaaaagctgaaaagatgaatatacgcctagattcatgcacagaataattagaataattcaaagcaaaggcattattacaaagtagtaatagtagtattcttctattggatgtatgtggtactaacaaaaccatggtggtcacacacttctttactgtgcaccaaaaaaactttttaattttattatttttcaaaacaaatatttatttttgtaacacctaatattttcttgcagagtaaactgatttaggtttctcatcctaaatcaaagaaaaaatgttgtcacagatgaagaaaatgattttattttcataaattccctctgtctacccacaaggggctgaaataattaatatttacacaaatgcaaagtactactctatagaaaaaaatttaatataaatcctcgggccaattttagtgattgcatttagagattattacaatgtaaattcaaattaactgtattagatgtgggttctacattcttcactttagaaataagaggtgtacatgaaaactagttaagaatatgctcttggaccaggctatattttgggaaaaaagggtaatttaataactatttcacaattatagaaaattaatcaccaatataaaataatatgattaacagtgatcttaaacatattttacctatacgtaagtggtgagaaattctatacccagaaacaaactatcaatttggtgaaagcactgggtcattaaaaacttaatatatatttcatgagtaagagatatattattatgctaacttactatcagaactctaatcagaactctttctctacagtttgatgcttgaggtgacacattgcttttatgaccttgtattgtcaatattttcagtacttgtgaatgctaaaaaggaataactgagactgcactatttataacatatataaaatagcctgctctcgttggtacaatgttttttaatgtttttttcattcccagcaatggatattactagtttttgcctattacttcttttgattagttctgattgctttgatctgcagaatgttttacccttctcattcaaaaatataaaataaattacaaataaatcccagatgaactagcattgtaactttcactccattataacatggtaaggttaaagtcacagagatggattggaatactatttctttcttttttttttttttccgagactagtttcgctcttgttgcccaggctggagtgcaatggcgcaatctcagctcacctcaacctccgcctcccaggttcaagcaattctcctgtctcagcctcccgaatagctgggattacaggcgcacgctgccacaccaggttaatttggtattttagtaaagacaggctttctccatgttggtcaggccggtctccaactcctgacctcatgtgatccgcccgccttggcctcccaaagtgctaggattagaggcgtgagccactgcgcctggcctggaatactatttctaacttaattttcttggtgtggaaaaagtatgttgttaagggagaaaaacccatctccaaatgtcatgtacacaatagtaaacaattgaatttgcaagttttaggaaaatcttgaaagcacaattcattggcatcgaagtagggtttatgacgctgtcttgatattaagaaataaagttggtattgcttcataagttacaattgcaaacaactcaaaatccgtgttgcaaagtgacataaaagtgacaagaaaaacaatgtgaaaagagacaaaagaaaacatatacaataaatattaaaaagtgagcaagtcctaaaatatgttcatttgcattaagttctaaggaatattgttaattcacttagtttctgaattttattttattttattttaataataattattattatttgagatggagtcttgctctgttgcccaggctgaagtgcagtggcatgatctcagctcactgcaatctccacctcccggttcaagtgatttccgtctaatttttgtaattttagtagatacctggtttcaccgttttggccaggctggtcttgaactcctgacctcaagtgatccacccgcctcagcatcccaaagtgctaggattacaagcatgagccaccacgcccagcctggtttctgaattttatgtaacagaatatggcaacaattattaattgttttcactggagaaaacgtagtgctaataaatcatatcattgacatttaaaaatattttggcattttaccttccataacatgtaattatattttggagatcaacaactagttaccaaatctaagccaccctatagtgagcaatttggtgcatctatatctacaaatatattgtttcattcatcattctgcattacatttttaaaaggccaagtaattgtttttactctcttttagatctttttaaatctattttatattatgttaataaatttaatttttcctttctaattattgtagcacgttttctctataaaatagtaacttatttagcatatataaaatgttagcatattattggagcatattttccttacaaaacagtaacttaaaggttaaggtacgtctccttaaatacctcagaaaatgaagcttattattttttatcttccagaaaattgcctttaaaggaagaagatgggaaagaagctctaaatccagaaactatagaaattaaagtttctaacgacatcattcaatcaaaagaagacgacagcaaagcataacaacaatattacaggggcttgaacaacactacgaagagtatttggattgcgtgaccctatgaccaaaactattccattgaccttaatttcttgggaaacttctagcttggaatagcttgtacacatatacatatgatcaaatactcctgcccatgatccattcccttttgttattgttgttgttgttgctgttgttgttaattttgttaagaatttcaatatcaagactgactggcaccaacactttggtattcaatttgattctatgactgaagtactggaatttattatgtggctaaagtgctctatttattaagaactatatttaataccaccaacaaatataggggttaaggaaaaaaaacgtgagctacatgtgtaagaaggccctgcatgtgtatgagtcctattctgggcaaatagattcttaaagtggctttcaacttcaagatgaaggagcttaataatggttactcattttatcaggggaatttcagggaacgtaggcgtcaaagagccagttatctttagcagatattaaaaattgaaaactttggagaactcatttcaagttatgattcagtgcattttcaacattgatttttgatagactgaagtgccagatcaaaattgttacccatttgaaagaatattagttgtatataaaattagattagaaagactttctaaatctctatctctttatatatgtcctattcattcacaatggattatacaaaaaaaagtgtattgcaagtgaaataatattgatttctgccctcagcttcaaataaagtaaattgaaatgggaacaatatcaatatggtgtcttgatatatttataaatatgtgattatcatttatttttaaaataatttatcaaaaaacaagtctttagtgttcaaatacttcaaatcatatcctcagatatatttttagcccatggttttatataatctttaagaactaattttaccactgttataggttcaccattaaatataattggctaataaaaattttaaggttgactaaattaagaagaaattatttaacattttaatgtgccataaaagagtaaatgataaataattaaatgccactatgtgttctattccggatgttctagctagaagtcattttaagattttgataaacaactttggttgaagaaattccttaagtattcaacacaaactttctaatatcttttgttagggttataccagaataaaatgcttctttacttccaagctatgcaagctcccagaggtaatagagtgacacatgatttaacttatatgtaaggtttaaaaaagtatttatcattataaacatacataccatttgggagcaggtttattaaccttgagagccaaaggtttccttaggccctgtaacattcagaacctttggtgtttcaggtggtattatagctcaaatagtgacaggacagggaatgcgttccaaaggaatattggagcaattttaacattgcagaaacctgctctgggtgtgtctctctgtagagataacctgatgattattaaatgtaaaattaaggcaactcatgaatatttttatttacaaagtgcttgaaactcagccaaggagagaaaactaagtacttttatataattcatcacttttctggctacagcaggacagaatatgaccatcttcgtttgaaggcaccaaatcgtcgcagtgtctttgccataagttgcagggttaaatgcgggaatctctccttgcgttcctgtctggcgtattctgaagaaaagaacagaattcttgtgcctacctaagaatttgagtagtgtctaaacaaacaaagcagttaggtcattttaactgacttgattatccaactggtctttgacagatttgactgttcatatttagtttatgtttgtctgatcatccagtttgctttattttgctgtgttttattttgttgtttgttttgttttgtaccagtgtactaaaactagtcaaaatacttgaattagtttgtttgtgcaaagtgtacaagcttagtaaagtgtccatgaagcaatagccatgaatgctaattatttctaaatagggccacatggttttaaactaatgatggtgaaagaaatacgatgactgagaaagtcatttcgcatgtttactattgttatattcgtgctttacttcaagagtgcagaaatcataataaataacaaactatttttgtgttttctcaatgtgacatttctgtttctctcatttattcggattttccttgtaaagaaattgacatatatttcatatatatatacacatatatatatatacacatatatatacatatatatatatgatgttaaatttcctgccactcatgtggagtaatgatctgaaattaacagataatctgaagctaattatattcagactatttcaagtgcactgtttcagttgcccgggtggtccttacctcttgtccttgaaatccatgccatgctgaagcaaggcaatactgtgataaagtattttttttaatatttcaatggaatgctccaaatgatttataaaaatttcaaaataaaagatggcttgtagtaaattgtaaaatatgagtagaactgaaataacctgtttcattcttattctagattaaacaaacatatacatataaccatataaatgttatttttattgtctgagagtactcttaaatattagtataaagtgtcaaaagaattgactgaatataagtactgttaaaataatttgaaccctatgatattttaaaccaagaggcaaagatatcacctaaaacttggtatttcttgataggttaggtgcaattaggcagtgacaatctgtattcaacaacatataagaggaaagagtaatatcagaattttgacacaaattaatgtgtcaacatattttacaatgattgtcaaaggaatttaagaattgtatttttaaagatttatttattatttttgtgggctaagacattgccattctattgatactaatgtctaacattaatgtttcttgttttcttttatttttaatattaataactataaaagcatttttcaaaggctatttgatccagcacacttcatatggatcttagtctttgaattaaatatttatataaatagattttattaatcaaattatttatttgtgtgccaacaattaattgtaactttatgatcatatctttgtttatgcttcttattttaaataattaagatgtatctgtgccttttaattagcatgacagtctgctttattaaaagaaaaaaactacaattaacatcattactagtatattttgcttagatttgagatactcaaatgatgctgtcttatttacagtcagtaattaagttcaattcaaactattttaccttgaatataaaatctaaatataataaactatactgtataatttactttaattcatgtcaaaacaattctttttatacacacacatgaaatattcttaatctgttctgtattgtttttctaaacaataaatacattctagatattgttgaaattaaattttgccagttgtaagacaaagacaacagataacttttgaaaatcaagcaaattactatggtgtttcttgggtcttcattattccatttatatatattttttatttcgaataataaatcaacctttatttttggcaataagattatcactgacgaaaatatgtacagttcaagaagtagaaataatattttccattagttaatttaggaaatattggaatagcatattataattatttatgaggttcccaatgttgtttttcacagaaaataaggtaaacattcaacttaaatcccccatgaagttttttcatgctcatactcataatcattatcacataatgtgcttattcaacaaactttgtatctggatatatttttaacaataagtttgttagcattatttatttatctttagagagaaaatatttgcatctgtttatttaccctttgaagcattaatacttagtcactcacattgaaattgcatatggatgtatcaacataggctaaaattaaattatggatgtcgcagaaatgaaatacttcatcttagaaggtaaaattttcaagaaagtattttattcatggacttaataatgtcttaagatgaaacaattttatgtccaaatgagaaatttataaaaagacccacatatagtagttgctgaacaaacataattttcttccagctcccatccttcctttttgaaaaattgaatttacccatgtagatgcagctatttacaattatacaagaatgcgaatagattaattatatcttctcatataaaggcaaagaattttatattatatataatgctaaatatttatttgataacacaatattcttagaaaaatagtttattactttaggattttatctataacataaatatattatttgttattacctctttaaattttcattttatacaatttttgagattctggccacacaacattcagaattattgctcatgtaaatttaaatattgctacttattttttttcttttctgaaatgaaaacatgaatcttttggcatctgtttttagcctcccatggaagacagtaagcaaaaccatcactgttggagaatttcaaatcacaacccgacataggagagtagagaaacaaagaaatgagtggatctagaaaggcaaactgaattgctatatttggaatagctaagaaggacctgactttgagaagtgctagaccagggactaggaacgttgcttagataaaaattatggccgattacactgatgcgaaggagaaaacagtgtaacacagaggagaaagttaacagagatagaatctatgatttaattttgcaaatagtttttttagagaacaacatgcatactataaaagaaatgatactattaagaacaaacctacttgttccaactcttaaagaaatattcatggtttagcatttgcctctaaaccctgttagaaatatgtgaagttagaaataaaggtttttttaaaaaaaaagcttttttggtatgtgaactgtatgctgtgctcagtatgtactgaaacatactatcttttattttctttaatttatatattccattcaaattctatattcttaagttagctaccacaacgttttcttattgtttcaatatggtatgtcccaatgaaatgctgtatatatatgtctaaactgtaaaaattatactgcaaatgttgaagttttgtatttatgagagacattgaaagtatggcttacagtatatcaaacttgtcacacttcaccatttgtatattaatagtaaagatacttttactttaataaagtgttgcattttatgtttattttgaataacatttctgcagtgagcaagcttatggcttttcaaatacttctgtgttaagaaatttccaaacatatgtctagatattctaaagaagagaatgctttctgccatcttatctctcaatgagttacaatcttttggcttctacactgagcagagctcagagaattaatgaataaacagttggtttagagcagtggttctcaaaatgtgaccccctagagcagcattacctgggaacttgttcgaattgtaaatttctagacctcaccagagattcgatcaatcagaaggttgtaggagagggccatggtaatttgtgtttcaataagaatttctgatgattctgatgcacgctaaaatttgaggtccaatggattagagacactttattttttcatttaccaaattgtgttgatcaatttataaatgctaggcaaccaactaaatatagcagttatgctttaacgcaatgtatgcattccccaacagcatcatattctgcaaaataatgcacttaataataaaaagacttgaaggaaaaataagtttggaacaaaccagtcaaaatgtaaacaactgtggaaccagagcattgtcacaagttaacagcaaacaaccattctttaaaagagagtataaacattggaacatattgaatgatagtctattattaacttctgtttcaaagctaatcatttcacacatgatttcacaagtacttttcattttttaaaactagtataaatgtgacttactcttaaaaactaaaaatctgagtgccaacttttcacaacggggcaattttcaatgtaagctttacaaatacctcaaaatacatacacatatagaataaaaataacatcaaacactttgaaaagtgaagaaaaagatatatattgtgcttggtatttcagtattctatgtttattataaagacaattaaaataaaatacaaactatgcctcatgaaagaagccaaaattaagtctctgatgtgttttggaaattgtgcaggtaaccctgataatattttagagaatttcttccacattttttctaacccaaggcattgcctaaatacaaattctctttattatacattaaataatgaacatatttctcctaagtttcatgccatatatggcctcagcattttaaatttcttttttaacatgagtttttaatacacaaattaaaatgttctcaaaatataaatattattttatattttatatgaggtgtcatatatgtactcgtctttggcataaacttgttctttaatagaacgcatacgtttgtgtattttaacttttctggataactttaacatcttccatagatagccttttgcattttattttttggtagagtggccactataataatataaaatttattacactttaatttagtctttaatttagatttttattaatatatgggctgtaaagtcagatatttctagtatttaaatgtcttcatatttggaaaacaagattaacttgattattttagtttacatcaacctttccaattccacctccaatttccacacttcctacttctctcatctttctttcatctatctcaatcatgaccaatgtcagaaactggcctgagaagtttgagatatataaagaaaaggatatttaccaaaatcagtccaaaacatttgtataccatcacatctggagatgaagcaaataccaattatcttggaagagtcgtttttgaaaatagagtttttgaaggaagttgcaattttctttgtgttgggaagcattggctgaagagaaggaaataggcatctagtttgtaagcaaggacacagactgaacccacagaggggatgcaacacacatccagggcttattcaatgctgtttgaggaagctttagcactaggtttgactatgtgaaggtcccctactaattataagggaagtactctctgaaaagcataaaaaaaattttcaccaattcagaaaccaagagatccaagagatccacacatttactcagcagaagagaaaagaatttcctacgtctttgcaaccaggatgcaaaactgggatccttggagtaatattgaaaaacagatgagaaccgagatattagaattagaataaacctaggttcacaccccaattccgttacctattactagctctgaatgtgataaatttagataaaaatttgcagctttatttcctcatgtataaaattgttatcctaaagtaaataatattcatcttcaagagattatttaaagatttattgagatcatatttatgcagttcttcatgcaatgtctaccacacagaaaataccaataaatagtagccatgagtatctttatatccgccatatttcaacatcgattctcagagtaagttacgttagacagtaacctattattgaataacaaattgaaatgtagtagtgacttaaaacattaacaatgtattattttttatgatttcacatattgatttgaataaattcggtaattattttgcaacatatgatgtagctgagctcccttaagtggctaccagcttctaaaaggcaaccttccaaatggaagtcccaatatgcaaatgctccccaagcctctatttgcatcatgcttgtgatgttcagtcagtcacattaaatcatatggataagcacatagtcaatgtgtttgcatagagggtgtaaacaagggcataatgcactgagcacaattaatgtcacaatgtagctcaatattccttatgtctcctaatgtttcacatcttttccacatgctaaactcactcaaacccttcctgaaactttcaatgtatattattgtgttaccatgataagatttgaattttagaatttattcaactaagttaatcccaggtgatcatagcatctcagggattacacctgggttcaattcttcagtgcagagttctgtccactaaaaagataatgtaactccttctggaaaactctacagataattataaggcaggagcaggatataacaatagacacggcaattcaaataatagggaaggaattggagacttttgacagttatgtgtctgtagaaattttgagatccagtcagaaaaaaatgaccaattccatcacccactgccccccaccaacagcacagggaattttccttaattagggtttgattccattccaagggtaagataactatctatattgttcttcgtattgttagggtcactctttgagatattcctacttttctataggaaagagtacgtgattatagctgggtaaatttcttggcttgtttcttggccagatgtatttactgcctagaaaactattttcatttaaacttcttaagtcccactaaattcaagctgatacaacttttttaaaacagtgggagttctagatagatagatagacacacacatataaacatgtatgtatatatatgtatataaaaacatgtatgtatatatatgtatatacatacatgtttatatatatacatatatatacgtatgtgtaaatgtatcaaattatagtctactacattagacaagaaccacacttaggaatgttttcaagatagttacttctctgtggggctgcaaagggggatcttattatatgattcccttaacaattttaaaagcccatttatccagttataaaagcctataaggcacggccttacattcccatgtgatctaacaaaggacacccttgattttttttttatccccaaactatgttttactgacaatacccagactttgatctttgactctatgacatttattacttttgagaaacttttgacagctagaaagtgtgggaaagagagaacaagtcttttgtaagaaataatcttctgaatgctgcttgaaaattgagcatatatctctctagcacgtatgtctcctgcaacaccctatcatacttgagaagaaaaaaaaagacaattagcactttcaatatgctgccttgaaatctccttagtcacattcacaaacacattaggtacattttctgttttccaatttatcataggcaacaattttcctaaatatctgcaaacacggttttctttgtctccagtccctaacagcaattttctcactgctctaagagacttcactaacagtcttctttcctccatttaggcctttatctcccatataatcacaaagctgatgacagaagggatatcgttttgttataataagagcccacttgcagtttccagtttcggttccacttatctatgcctgtgtgttagtttcctcttgctactgtaagaaattacaatgaagttagtggctttaaaaagaccacaaatgtattattttacagttctagaggtcaaactctgttatggacttcactgggctaaaatcataatgtcagcagtattacattactttaaaggctgctagagtctgcctgcattctttgacttatgatcctcttccatcttccaggccagcaattgccttactctgagccttgctttcatcgacacacctccttctctgactcagactccctgattccttattttcttttcaggagctttgcgatcacattgggtctaccttgatagtccagcataatctcataatcttcccctctcttgtccttagttacatctacaaagtggttttttttttggtggtggtggtggtggtggtttttttgtttgtttgtttgttaacatggagtcttgttccatagcccagactggattgcagtgacgcaatctcggcccactgcagcctctgcctcccaggctcaaatgattctcctgcctcagcctcccaagtagctggtactatgggtgtgcaccatcatgcccagctaatttttgtatctctactagagatagggtttcagcatgttggccaggctggtctcaaactcctgacctcagataacccacccgcctcagcctcccaaagtgctgggaccacaggcatgagccacctcccctggcctaaaaagtcatttcattccatgtaagatgatatatttgcagctttcagtaaataagacatcctttggggtaccattatcttgccctccactgtctacataacaaaccactgcaaaatataatgactaagagaatcccactttattttatctggtaattctttgaattgagttgggttgattttatatatttttttccctaccttcctggtgtgttgaagtcagtcactgtattagttggggttctctagaggaaacccctactgatactcacccattgtttgcccgtgggtgagtattaagcctctactaagacccagttttgggccaaaagctgtttctcgatagaagaatagctatcttcagataatgccagggtcgtgctctaaaatcctaaaagctcatgctgtgactctcttatagagtcctgccaaagtctccaaaaaatatccctatctgccactgacatttcaagtaccgttgaatctgctggatcatatggcccatgtggccgaacagcttgcccagagcctggacctgtctttcttttgttctaagccctacaaaaaactagcagctttttggggtcctatttaaatgggctgaagtagcatactaaactgtggattgtgttgcattcacaatctaaggaagcccactaggcattgtgcctctttatttattgtgggagacaccaggtgcaacaactcattcatcactttaagatatacctttaacattattcctcccagtggacgtccacaaatttgttagatacagaattctggattttagtaacatttatttctcatcttttaacatgtaaaattcttatcaatgagtctgaatagcggctacttctttctcactagatccaattagtaaaatgtcatcaatgtaatgggtctgtgtgatatcttgcagaaggaaaagaggatgaagatccctgcaagccaaattatgatataaggctggagagtttatataccctgaggcaagacagtgaaggtaaagttctggttttgctagctgaaaacgaatcacgtctggtggatagacagtgttggagaaaagggcatttgctgtatcagtaactgcatatcacatatcaagggatgtgttaatttgcccaagcaatgaaataaaaactacaatggcatctgcaatttgagttaccacctgattaagcttatgataatctgctgtcattcttcaagattcacaggtcttctgcaaaagtcaaataggtgagttgaaaaataatgttggaattaccgcccctgcaaactttaaaaccttgatggtggcacaaaactccgcagttcttccaggaatatgatattgcttgttacttactattttcccaggtaaaggtagtgataatggctttcacttggtctttcccaccataatagtcctaactttaagaagaggcaaaatgcaagactgggcctttgatttgcattgtacttcagccagtcacaggatgaggttttgagtttgatattcagcaatttcagccctgtgactacaggaaataagattctccttctgggtatacattgaatgtcttaagttgtttacttgatgcttgagctgagaactcaaatgtctgagctcatcttttattcccctactttgtccagtgacattagaaagaactaacccatgttattatatttgttagttttccaaaaatgtttgaaggtgtcatatacagtcatccatctccttactttttgtatttggttgattagtagtatatattacagacagttttcatacctctataaagagttcacgacgtggactatcagtgctctttacattactggaaataaagacatttgtatctttaaatctaattggattagaaagcctattctggaaaccccagtataaattttaaaactcattctcaaaattattttcctctagaacctttcttggtactgaaatttatgttagtctgggttcccagataaactaaaccttgagttacacgtttcagactttgcaatgaagaaacattacaacaatcagctataccattgtaaacggatgcctaattactgtatatttaagtataaaaaataaaatacgtacagtctaaaaatataagaaaaaattttatagaatataattttgggcattgtgatttagagagaattccttaacctcaaataaaattgacttagataatcacctaccttgttttcacaccaaaatgatcagaaactttcaaaacttaattcttcagccaaaaaggtagaaaataaattaattttaaataaaagacaatcgtgcttaagagaaatggctaccttgtttacagtttctgttatgtctcctacaattaacaaaaagctattttttgttaagtgaaatatatataagcatatatataatttctgattgaaacacacatatttcaatgtgtattttaaatacgtgtatttataatttgtgtgttggaatacacatattattgaatgtgtgtttgaaacatgcatactgattgaaatatatgcatttatgtgtttgaaatatacatgtttcactgattgaaacatacacgtttataataatccatgtttcttgaggatttcaaattatttaacaatattcagatcctaaaatattctatctcttataaattgagaaacatttattattttcaattgcacattaataggtgagtgaataaacaaattatgttcaaagagcatacattgtaggacttgaatacatttcaatagtcagaatacaatctatcttggcaaatgttccatagaaactagcaaagaatgtgttttttggtgccgttagattgagtgttctatgaatgttaattatgtcactgtggttaataatgctatttatgtgttcaatatccttactaatttcctgtctcatggttctatctactattcagagtggtgtcaatatctgcaactataataaagaacttttctagttctccttgcaattctattgctttttccttattttacttgaagttcattatcagatatagaaatgtttcagattgttatggcctcttgatgaatcagctcctttattactataaaaagatcctattattttaggtaaaatgctcttcgctaaaatttactttttgtgtgatattacaatagccactataacagctaccaacaaaagaaatgaactattgctatgaacaatataaatgattctcagaattatttgtccataagaaaaaagccagaaacaaaagaccatgtgttttatgatcccatttgttaaacatacacacccacaccacacacacacacacacacacacacacacacaatctagaaaagtcaaactaacagaaaataaaataaagatgatcagtatttttctggccatggggaaaatgggatgtggtaggagagagagatttgaaagtgctacaaaacaacttggggataatagatatgctcattatcttgattgttttgttactttcacaggtgtgtacatctggtaaaactgatcatattgtgtacataaacttgtgcagtttattgtttatcaaatgtgcctcagtaaaccagtgtaaatgcaactcacagtcttattgcattagtaaagtataacaacatttgttctgtgaacaattgataaggtcaaatagtaatttctctgaaaaaaaatatgcattttactctgaagacataaaattattcatgtagtgcatttcaatttttatatataaaaatccaaacaattaagagtaactgatgaaatatacttcaaaatatttacataatctgttgtttaagttatcccactttgatatctttattttcccaaaggcacactaaaatgaatatatatttgtatttttccatggggaaatgtagatgcctgtatgtagatgctgttttattacacagagtagtgaaaggttagagctcaaaagggctttggttttacatatgaagaagataaggtttattgagtcttgttaataattctgtactaattgatactgagcctagaccttgtgtgcactatgtatatatttttaaagggcattctgtaaaaggcctactttgaaagattactagcattgctttttcaggttttctcactgatatggtttgggtttgtgtccccatccaaatctcatgtggaattttcatccccagtattggaggaagggctgggtaggaggtgattggatcatggtggcggatttcccctttgctgttattgtgatagtgaggtctctctatatctaactgttacaaagtatgtagcatctccccctccactctcttcctccttctccagccaagtaagacatgcctgcttccccttcaccttctgccatggttataagtctcccgaggtctcccgagtcgtgcttcctgtatagcctgcagaactgccagtcaattaaacctcttttctttataaattacccactcttgggtaattttttatagcaatgtgaaaacgaactaatacactcacctagtgaatgacccaggaccagaactcagttttgctgaatctgcatccgccttattcattcatattgtcttcattatgaatgaagtatggaggataaggtctgcatccacctcattcattcgtgttgtcttcattaggaatgaagtatgggggataaggtatcatttcgtttcttttgtatttctttttctacttttattttagatttgggggtacatgtgcaggcttgttacatgggtaaagtgcatgttgctggggtttggtgtataagtgatttcatcaccgagttagtaacacagtaccggatagatagtttttacactctcctcggtgtctactattcctcttttggtgtctatgagtactccacctttacctcccacatataagtgaaaaaatacagtacttggtattctgttcctgctttaatttaatttagcataaagcctccagctacatccatgtttctgcaaagggcatgatttcattcttattacggctctgtagtattttatgatgtgtatgtaccacattttatttacacagtccgctgtcaatgagcatctaggtcgaattcatgtctttagtattgtgaatagaactgcaatgagactgagttcattgcagtataccccagttcactgcaatatgagtgcatgtgtctttttggtggaacaactgatatggtttgtatctttatccccaccaaataccatgttaaaatgtaatatccagtgttagaggtagggtgtagtggaaggtgttgggatcattgatgaggtagatcccgcaagaatgtcttaatggaatctccttagtgatgagtgcgttcacacaagatcaggttgtttaacagtgttaggtgcctcccattctctctcttttgttcctacttttgccatgttatgagtctgttctcactttgccttctgccatgagtaaaatctcactgaggtctccctagaagccaagaagatgctggtaccatgcttgtacagcctgcaaaagcatgaaccaatacgcctattttctttataaattacctagaatttctttctaaattctttataaaataaaacctattttctatataaattacccagtctcaggtatttataccatcacaagaatgccctaaaacaacaatttatatttgtctgggtgtgtacttgataataggattactggattgaattgtagttctgttctaattgatttgagaaatctccaaactgctttccacagtgactgaactaatttacattaccactgtcagtgtataagcattgcttttctccacaacaacatcaacatttgtaattttctgacattttaataataggcattctgactggtgttagatgatatttaatggtggttttgatttgcatgtgtctaatgattagtgatgttgaggatcttttcacacgcttgttggacgcatgaatgtcttcttttaagaagtgtctgctcaagtcctttgcccattcatacatggggttgtttgttttttgcttattgatttgcttctgttcctaactgagtctcagtattagacctttgtcaaatgcatactttgcaaatattttctcctgtcctgtaggttgtcgattaactctgctgatagtttcttttgctatgcagaaactctttactttaattaagccccacttttctatttttgcttttgttgcaattgcttttggggacttcatcattaatcttttccaaggccaatatccagaattatatttcttaggttttcttttagggtttttgtagctttgagtctcacatataagttttattccatctcaaactgattttttttctttccctatgtttttaggacacctcaagccagtgagtagagttgattttgtgtatggtttatgttctgtgtatggtacatattttgtgtatggctcaatttcaatcttctgcatatggctagccagtcatcctagtaccatttattaagaagtccttttctcaatacttgtttattttgtcaaaagtcagatggttgtagacgtggggctttatttctgggtcccctgacttgtccattggtctatgtctctgtttttgtactagtaccatgctgttttggtttctgtagccttgtgatatagtttgaggtaaggtagtgtcatgtctttggctttgttctttttgcttaggattcctttagctatttgggctcctttttggttttatatgaatttgaaaatagttttttttccagtactgtaaataatgtaattgggagtttgataggaataactttgaatgtgtaaattgctttggactcaatggtcatattaacaatattatttcttcctattcatgagcataaaatgtttttccttttttgtgtgtcatatctgatttcttgcagcagtgcaccataattttcattgtagagatctttcacctacttgcttagatgtattcctcagtattttattatttctgttactatagtgaatgggtttgcattcttgatttgactttcagcttggatattactggtgtatagaaatggtaataatttttgcatattgattttatatcctggaaatttactgaagttgtttattagttctaggattctttgggcagactatggggttttccaggtataaaattatcattagtaagcaggaagttcaactttctcttttcctatttggatgccttttatttatttaccttgactaattactctggctaggaatttaatacttattgattagaagtgttgacagtgagcatttgtctttttttccaatttttaaggagaattcttttggtttttgctcattcagtaagatgttggctgtgggtttgtcatagatatctgttattattttgatgtatgttctttcagagactaatttattgtagattttcaacataaagtgatgttgaattttattgaaaggcttttctgcatctattgagatgattatgtagtttttgcttttagttctgtttatgtgatgaatcacatttattgatttgcatatattcaaccaaccttgcattccaggaataaagcctacttgatagtggtggactagcattttgatgtgctgctggattcgatttcctggtattttcttcagaattattgtgtctttgttcatcatgaatactgatctgcagttttctttttttgttaggtctctgccagatgttggtgtcagaataatgctggtcacatagaataagttagggaggagtctctcctccctgatttcttggaataatttcagtaggattggaaccaggttttctgaatacatgtggtagaatttggctgtgaatctgtctagtccgtggcttattctagttggtagggttttttttaactgattcaattttggaattcattattggtgtgttcaggattttaacttcttactggttcagtcatgggaggttgtatgtttccaggaatttatctattttcttgtgtctgtttataatagtctctgaggttttttttttttctttttttttttggatttctgtgtggtcagtaggaatgccccctttgtcactgctgattgtgtttgtttggatcttccccctttttggttttatttatctagctggtggtttgtcaatcttgttcattcttgcaaaaaaccaaacttttggtttcattaatcttttgaatggatttttgcttttcagttttaatttagctcaaatttttgttatcttctccttctagctttgggatttgtttggtcttgtttttctagcacctctaagtatgatgttaggttgttaatttgcagtctttctaatttcttgatgtaggcatttagtatataaactttccttttaacagtacttgagctgtgtcccagagatgtacttacattgtgtatttttattagttacaatctttttttgccttaatgtcattttttatccaaaaatcattcaggatacagttattaaatgtccatgtcattgtatgattttgagagatcttggtattggtttctttctttttttttcttgagacagaatctctctctgttgctgaggttggagtgcagtggcacaatctcagctcactgcaacctccgcctcccaggtttaagcaagtctctgcttcagcctcccaagtagctgggattacaggcacctgctaccacacccagctaatttttttgtatcttaatagagatggggtttcaccatcttggctaggctggtcttgaactcctgacctcatgatctatctgcctcagcctcccaaagtgctgtgattacaggcttgagccattgcacccagccttggtgtctatttttattgctgtggtctgagagtgtggttgatatgatttcagttttttttggatttgttgagaattgttttatcaccagtgtatggtagatcttagagtgtttgctgtgtgcagataggaagaaagtatgttttgttgagggtgcatggagtattttgtcaaagcctatcaggtcagtttggtcaagtgttaattttagatcccaagtatctttgttagttttctgccttgatgatctgtctaacactattaatggtgtgttgaagtctcccactattattgtgtggttatctaagtctcttcataggtctcgaagaacttgcgttatgaatctgggtgccacagtggtgggtgtatatatatgtaggatagttgggtcttcttatgttgaatcttttatcattatgtaatgcccttctttgtcctatttgataattgttggtttaaagtctatcttgtcttaaatagaatagcaatgcttgctctttttggtgttccatttgcttgttagatctttctttgtccctttactttgatcctatgcatgtcatttcatgggaggtggatctcttgaagacagcagaaagttgggtcttgcttctttattcaacttggcactgtgtgccttttaggtgggacatttttcctattcacattcaaggttaacactgatatgtgaggatttgactctgccattgtgttcttagcttgttattatgtacactaggttgtatagtagctttatagtgtcagtgggctatgtacttaagtatgtttttgaggtgtcaattaatggtcttttgtttacatgtttatggctacctgaaggacctcttgtaaggcagttctggtggtaatggatttccttagtatttccttttctgaaaatgatttcatttctccttaccttatgaagcttcattcgtctggatatgaaattctaggcaggaatttattttcttttaggatgctggaaacaagcccataatctcttctggcttgtaaggcttcttccaaaagatgtgctgttagcctgatgggattccctttatacatgacttgcctttctctttagctgccttttcttttatgttgactttggagaatttaataattatgtatcttgtggattgttgtcttgtatagtatcttgcagtgtttctctgaatttcctgaatttgcatgtcaacttctatagcagtattttggaaattttcatagacaatatcgtcacatactttttttaagttgtttcacctctctctttctctttcaggaatgctaatgagtcataggtttggcctctttatacagtctcatatttcttagaagtttgttcaattttcaaaatctttcttttttattttttctgctttctttgaactggaggagcagtctttgtgctctgagattctttcttaagcttggtctgttctgttattaatgcttccagtagcattctgaaatttctgtagtgagtttttcatttgcagaagttcaatttggtttctatcttaaaatggtcatgttgcctttcaattattgaatccttttgcagcgttactcagattggatttgaagcttctcccatatcgccatgtgcttccttgctatccacattctgaattctatgtctgccatttcagccatatcagactggctgagaatcattcctggagaactattacagccatttggaggcaaaaagacattgatatttgtagttgccagagttcttgtgctgattctttcttgactatgtctctggatgttcctttgatctttgaaattgctgtcatttgggtggggcttttgcttttatattgtttggtgcccttgaaggtttgactgtagtataagttaggtttaattgattggcttctgatgtagtttggctgggtccccacccaaatctcatcttgatttgtagtacttataattcccacatgttgtgggagggactgggtgggaagtaattgaatcatggagtggttactgccatgatgctgttctcatcatagtgagtgagtctcacgagatctggtggttatatgaagggtggtttccctgcacacactctctcgtctgccaccatgtaagacatgactttcttcttcccttatgttcctccatgattgtgaggcctccccagccatgtggaactgtgagtccattaaacctcctttcctttacaaattacccaatcttggtaataattaataattattaataattaattttaattaaaattaataattaataattattaataattaattttaattaaaattaatgattaaaatattaacaattattaataatcaataaaaacattaataatgtctttattagcagcataagatggactaatacagctacatttctggaggctcagcactcctgggctgcatgctctaaacttcagggcttggaccatgcccacagctttgttgtttggcccctcgacgttaaacacctactccactgaaagggcagaggttttttcattctactggcatcaaaactccaatgggggctgctgactaaagcacttcagtgggtcagtggtgggttcacatgcatgtgtacaccagcaaggcagctgggggaggtcaatggtgagtgctcacaggctccagaaggctgcagctggtgcatgcctgtgggattccatctggaaaagcactttgatgagtaggagtatgccagtgaaaaagctatggcagtggccactggcagactatggctgtgttgcaagcatatgcagccaggcaggagcccttagagaggtcagcagggaggggggacactaagattagactaccccatcctaccagcacaacacccctgctttgtccaggtctagcatctaacaaaggctaaaggcacctaaagcaacatagcaagcattcagagatgtatactcatggatattctccactatagctgttcccatgccaaacctgggctccacataggctgaaattcagtctcttccaactctctgggaacttctttctataagctagtgggggttgtggggtctcccacatctaggatctaaaaagttcattttttggcctctccatgcctatgttactcacctaatacctatgagctgcttagggtcaggaacgggtcatagtgctcagcaatcccatgcagggtccccagattccacaccagctgggggtcttcattcttcctgtctccactttcaataccttctttccaaagaacagattagagtgtgttgctctgcatgatggtatcctctatctcagtgggagaagctctctctggctaaatctattagtttttgttgttgttcttttgttttgtttttttgaatggagtctcactctgtcacccaatctggagttcagtggcacgatcttggttcactgcaacctctgtctcctgagttcaagtgattctcctgactcagcctcctgagtagtgattataggtgcatgccacaacaccagctaattttttaatttttagtagagatggagtttcctcatgttggacaagctgatctcaaactcctgacctcaagtgatccacctgtttcggcttccaaaagtgctgggattacaatcatgagccaccacacccagccaggccattcactgttattccactttgacatcttatctactaaagacaattttaatgaaaatactcttccagatgaacagttaaattatttcatttatattatttaggtaaattttgtgacctacaagcagtgaaaatacaaattttgaaactagttatagaaataaaagtgactccaacttggatgctaatctgccatgttgacttctgattagccctactcctgtgaatacttcctgatttctattttattttttcactgtccttagtgtaagaataaggcaaacttgatgttatcacataaatgtagggtagaggcatgtagcattgttacctagtctggagggttgtctttaattgtgttgctcagaccacttatatctttcctctatggtatatagcccttggtactggcgagtatcagtgtggagttatacctgtcttgctaccacccaagaccatgtttcgctgtctgtaagttcccagatgaactatcctttagagacaaactaaatatgtctgtcttgttcttttgtttctagactcctttggcctttcatggaacactattcaaaattgattgtacaaacctgacttttcaaaagtattaataaaatacagtgaaaatgacaagtagaaattcagatgacacaaaaattattaggacatccaagcaaaactgggttaattttttaaaatataaaataaatcatgaatttctacacagccaaaggaatttatcttaacataggccagaaaacagttacagagaaatcaaaccatcattattacaactaccttgccataaactgagataattaaagtggaaaaacttgaagtttttcaaaatgaagtggaatatttattttgcattttggataaatcttaatgtagctttgctagaaaaataaattttaattaaaataagtgagctgggcacagtggctcatgtctgaaatctcagcacttcaggaggccaaggagggcagatcacctgaggtcaggagtttgagaccagcctggccaacatggtgaaaacccatctctactaaatatacaaatattagccaagggtggtgacacatgcctgtaataccagctactcgggaggctgaggcaggagaattacttgaatacagaggcagaggttgcagtgagctgagatcacaccactgcactagagcctgcgtgacagagtgagactccatctcaaaaataaataaataaataaataaataaataaataaataaaaagaaatagacaagtggtaccttaaaattatatgtaaaagtaatggttgtgagaagtttgaaacacaatatggataaaaatgaaataaataatgtttgtcactttattaagaataaatgaagaaaagaaagatgaaagaagaaaaataaaccaataaatttatttttttgctgctattgtaaaaggggttaacctattgatttgattctcagcttggtcactattgattctatttgctatcatatccattgtactgctggttccatctggtatatttttattctattttacgttttaattttaaaactttcatttgtatacttttataacgtttatttttgttggaatttcccattttaaaatttctttcaagataatctgtaattgataattgaaatgatttttagatagctacattaacatcatttaagataattctgatatctgattcatttcagtgataggcttagttgatcatattttttcaataaacttatgaattcttaaatgttagtatgatgggttattttcaaatgaatcctagtcagtttgtattattttgttagcactgggtctttaatatctatccttataattttgtcttgaatacatacatgtggtgttgtattagcccattttcatgctgctgataaagacatacccaagactgggcaatttacaaaagaaagaggtttaatggacttatagttccacatggctatggaggccttacaatcatggaggaaggcaagaagcagcaagtcaggtcttacatggatggcagcatgccaaaagagagcttgttcaggggaactcctctttataaaaccttcagatctcatgagacttattcactatcaccaaaacagcacaagaaagacctgcccccacgattaaattacctcccacctgatccctcccacaacacctgggaattcaagatgagatttggatggggacacagccaaaccatattattccacccctggcccctcccaaatctcatgtcctcacattttaaaagcaatcatgcctttgcaacagtcccccaaagtcttaattcatttcagcattaactcaaaagacaacagtccaatccctcatctgagacaaggcaagtcccttccacctatgagcctgtaagattaaaagcaagttaattacttcctagatacaataggggcacaggctgtgggtaaatacagctattccaaatgggaaaaattggccaaatcaaaggggctacaatccccatgcaagtccaaaatctagcagggcagtcaaatcttaaagctccaaaatgatctcctttgactctatgtctcacatccagatcacactgatgcaagacatgggtttctacagtcttgggcagctctacccctgtggctttgcagggtacagcctccctcctggctgctttcagtggttggcattgagtgtctgcggctttttcaggagcacagtgcaagctgtcagtggatctgccattttgaagtctggaggatggtggacctctactcacagctccactaggcagtgccccagtgtggactctgtgtgggggctctgactgcatatttttcttctgcactgccctagaagaggttctccatgagggctccacctctgcagcaaactgctgcctggacatgcaggtgtttccttacatcctctgaaatctaagcagacgttccccaacctcaattctcaacttctatgtacccacatgcccaacaccatgtgtaagccaccaaggcttggggcttgcacccgctgaagcaatggcccaaactatacgtagaccccttttggccatggctggagttaagtagctgggaaacaggacaccatgccctgaggttccatttaccgttggggcctaggaacaaaaaatgggtttgtgggccaggctcaggggccccctgctgtgtgcacactagggacttggtgccttgggtccaggcccataaaaccatttttggctactagacccctgggcaggtgatgggagggactcctgtgaaggtctctgacatgccctggagaaattttctccattgttttggtgattaacattcagcagtaccttacttatgcaaatttatacagctggcttgaatttctcttcagaaaatgggtttttctttctatcttaccatcaggttgcaaatgttctgaacttttatgctctgcttcctcttgaatgctttgccacttagagatttcttccgccagatacactaaatcatctatctcaagttcaaagttccacagatctctagggcagggacaaaatgccactagtctgtttgctaaagcataagaagaatgaccttcactcatctccatctgtgaccacctcagcctggacttcattgtccatatcactatcagcatcttggtcaaagtcattcgacaaatttctaggaagttccaaactttcctatatcttcctgtcttctgagccctccaagtctccaggaagttccaaactttcccacattttcctgtcttcttctgagccctctaacctgttcctatctctgcctgttacccaggtccaaagtcgctttcacattttcagctatctttacagcagcaccccactctatgtgatactaatttactgtattattctgttctcatgcttctataaaggcatacctgagagtgggtaatttataaagcaaagagatttaattgactcaccgttccgtatggctgagaagacctcagaaatcttacaatcatggcagaaggcaaaggagaagcacgcaccttcttcatagcatggcaggacagaatgagtgccagcaggggaaatgtcagatgcttataaaaccatcagatcttgtgacactccctcattatcaggagaatagcatgtaggaaaccacccccaggaatcaattacctccacctggtcccacccttgacacgtggggattacggggattacaattcaaaatgagatttgggtggggacacagagccaaaccttataatgtagtaaccttgaaaagaaccaaggtcaacatattctgcatcaactaggtgtaatcttcataaacgaacatggccatgttattttgtatttacttgatattgtatgttcgagcctttctgtagaaaagcaaagtaaaatcatattctagttaaaagtgtaagtaggctgggcactgtggctcacacgtgaatcctacaactttgggaggcagaggtgggtggattgtttgagcacaggagtttgaagccaactttggcaatatggaggagccttgtatctacaaaaagtacaaaaaataactagatatggtggtgtatgcctgtagtcccagctacttggatagctgaggtggaaggattgcttgaggacaagaggtcaagtctgcagtgagccatgatagcattactgcactacagcctgggtgacagatcaagactgtgtctcaagtattaaaataaaataaaagtataaataaaagtttcactgtgatttaaatataggtaacagtggaaaacatagaagaatttatcctaaaatgtagtgtagaaatacaggacaacacaaaataaaaacaaactcagcaaagcattaacatttcaagtagaatatcacctacctgtggtcctttgcctcactaatgtgtagatcttttttaggagcagtaaatactatataattattatatttgatgggtacattattaaattgattagctccttaaaaataatggaaacggataaaaattgttttataggatatataattatgtcaataatgaagacatctcaaaggaggttatattattttctgaatagacaggaccaagaaaaaagtgaaatgcaaaacctgcactttactttcaaacccaacacattgaacataacagtttcaataaaacaacaatattccttgaatgaattctgctagttcaagttttttggcatggtgattttgtttgtagttaattagtctttttgattgttttacatgtggaaaggaaccataagcagaaaagttatttttgtgactgctatggtgtgaatgtgtcccccaaaattcataatgttggaaccatgatccccaatgttggtgttgggagatgagatataatgggagttgcttgagtggtgggagaactgcccaatggatagattaatgccatcatccaggaagtgtctttgttattgtgggggtgcattccttattaaaggacaagttcctgccccccttactctgcctttgcccttctctcttctgccatgaaacgatgctgccagaaggtgcttgccaggtgccagctccgagatctaggacctcccagtgccagaaatgtgagaaaatacatttctgtcctttataaattgcctagtttcaggtattctgttataccagcacaaaatggattaagacagtgactgaaaataacattgtataaaaatattaccttgatcatattcaatattgtgatatacagaaaattcactttcatgcaatcagtagttaaaccaactacccatcatcataattgatttttcaccattgaaaaactatacaaaggatctgacccctagaataatcttgaaaccattttaaattaatttaaacattgaagagttctagtaaaacacaaaactaaataaaaactatgctatgcaaaatgaacaatgtctcttcttgcccagctcagtgttttggggaaccagaaacaaaccaataaaataaaggcgtggaaaggctactgtgagaacagaaaggagcaactggggcactgaaacaaaaacaacctgcacagaaattaaattgagccagaacgtaaagaactgaaggaagtgtctgatacagagaagagagaaagtacatttaggccaaaagaatcatcacaggtaagggccggagagggtttgaggtattgaaaacaagaataggaattccctcatgaactgaacatatagagactgggacagtgggtagagaagaggctaggacagttttaacagctttatatgtatcaggatgtggtgtgtgcaaccagtcatgtagacctctttgaaagagaactgaaatggacaggctgaacaaagaaggttgtccttggcatggagctgaaacatttccagatgagctctctgctggcaacagagataatatacttggtttgccattgagcaaccctgcagaataattattatggaaactattagtatggtcatttagttcctcaatggaataaaagcctgtcactgggtttgataccactatggctgtgtgacagcaaggtgacacataaggcatgaggagagatcaggtatttgattttattggtgaactgtctaataatctacaagcaatatccatttgaatataagtaactgaagccagaatatagctaaagaataaaacgtcatttagatgttttagaattgcaaatctggaaaggctaagcagcataattatcttttaaatgtttcaattttaatataatttatgtcattgaggcaaaactttttatggtttataatacaagtatattctcccttaaccccattcccatcttaggatgtcctttatttagtgtaaaattttaaatagggaaaacttaatgactcattcatttccataatcatttatggccattataatataggtcactcacagcttctgctattatcagaacattaaagaccctgctggggcctctcattgttatttgcttgacatccacttaatatttaccattgggaacatcacagatggcccacttttcttctgatcctagtaatgaagaataatcattattttcatgggtccttctggggtactctatctgtaagtaaatacctttttggaaagagagaaattgtatttgaagaggcattaccaattgaccacctccacaaaaaaaagcctgcagttaaattggatccagattcttcaaactttaatccatgagggaagatgtgaataaagataatgagataaataaatatgaaatcactttgtaatagttgcatcacttaggtatatttgtatcctaaatattcctaagtaatgcgactaataacaaaaaaaaaacctcactcaaactggtttaagatagggaatttactatcctctatcactgaagattccttatcttcaaaggaagggattgctagggatttcttcaggtacaacttgttttaagtgttcaggctgggtgggttgacttacgcctgtaatcccagaactttggggggctgaggcaggaggattgcttgaggaaaggagtttgataacagcgtgaggaaagcagcaaggacctgtctaaaaaaaaaaaaaaaaagacttcaataatgtcattaaatttggtttctctgttacttggctctgtctttcaaaattatttcatttttacacatgaaactccatgtggttgcaatatacccaatttctgagattacatctacatttagtaggaaagtggttttaccctgacaatttctgttgaaatgccagttgatttctttgagtcagattgtatattatgcccatccttgaacatagagcagtgctctagatgttgtgaaaactgatcacttcatcactggctaacacagtgcatatatgctgaaacaggagaaaatggagaagagacccatacttatgctaggtagctaaagtaacaaatcaccacaataataaatacagtgaaaaaaatacctgatgtggttgtgatcattagtgatagtttggtcatcagtcagttaaagctaatgtctttgaaaatcataaaaccatatatatttaaatttaaatcttataaaggtatgtactttaaacaaatcttttgatataaaactattatggaatggcatgcaaagcgaatcttagagaatggtgtataagattgtctttctttcctgaaagacgctaacagtatatattctgtaatttccatttctattctttaaggtaaatatgcaaagatacttgcaaaataatctgattccacaactgtttttgacaattttccttctaatgttgtagttgtgtcttccacagtgttaacactgattttttagatattcatagagaatgatgtcacagttgtcctcttatccaaaaacatacatgaagtatatattcttggatttcttgttttaatttttatttttaaattttgtgggggcacagtaggtacatatatttatgggtacatgagatattttgacacaggcatgcaatgcatgataatcacattatggagaagggggtctccatgcctttaagcatttaacctttgtgtatactcttttagttattttaaactgtacaattaggttattattcattatagtcactaaataagccaggaacagaaagacaaacatcatatgttttcacttacttgtggaacataaaaatcaaaactcttgaactcatgggtttctatttttgttgcctttgaagtacagtgagaaactcccagtccagagaaaatgatctagatctattcctctctgttcttccctcctcttccccactaagcactatactatgaaccctggaaatagcccagcagacaacccaaaatgtacactgaaatgtgataaaaagttgaccgggttacagaaacaagattggagaaacaacacagtgacatgtgtatgcatacgcatgtgcataagcacacacacacacaaggaacacacacatacacgcacacacacaaggccacacagacacatcgtttaccgacctaagcctagcaagagagggcagcccacataagttcatttctcccctgaataaatcaaaaggtccctcagacaacatcagaaataaggaatcaattaggagccccccactttcccaaaataaagaagaggctgtacggcaagcattgtcctttcccatcaaatgcaagactactttccagtaaacctcttcgtctatataggactaaaactacccttcacttcccagagaaagcttgcccgattagtgtaggaaggaaggggagttaccactttccccctacctaccaaatctggggaagccccctctacctcctcaagcaacaccagcaggacaaagtagaatgccagctgcaaccaataagccaggtagactgctatgatatgaatgctgtatctccacatagcttatatgttgaaacctaatccccaatgtgatggtgttaggaggtagggtctaaatatctattacctcccattagacattagtgcccttttgaaataggtaccagagagctcccgtgcccctttcaccatgtcaggacacagaaaccatgactttctatgaaccagaaaaaggaccctcaccagacaaggaacttgtcatctccttgatcttggactttggggccttcagaattgtgagagatatattttttttaatgagccattcagtctatggtattttttcttagggcagccctaacagactaacacacagacggaaacaaaactgcaaaagttctgaaaactccactgacagcctgtaaaagtaggccaagctgtgggctaaacctaaataaggtgactgcctgctgaaatagtaaataaaaataaaagtagttaaacagacctagagtttcctaactgtgaagaaataacactgccctggatttctcagaatttcagtaagtcatagtttcctgagactctttacacaccatgaaaattagatctgcagccatttgtctaattaattgttttgattcaaaaggatagtgcaatttcttctatctgcctgaagggttcaaatgattctagcaccaatacattcctagattaaatcactgaggagctaggaagattggggttatcttcttcaatacttacattccaaggaataatgaggccgttggaccttggagagagctttaggttataatatctgtgacatgaaagctatgtggtgctcatcaaaatttttatatatcaaaattttgtatatgtcaaatttctgaaataaggagatgctttcagtggagtagggacatcaatttttcccctttataagcagatacatttttttcttctctttaatctatgacaggtgtgccctctcatgtaggaaaaaccccattagctttcaccttgtctccctaggggtaagaaaagtcccttagaagagcctactgcttattatttactgttctaattggaaatttaacacctgatatggtttggctctgtccccacccaaatctcatcttgaattctcacatgttgtgggagaagcctggtgggaagcaactgaatcatgagggcaggtctttcccctgctgttctcgtgatagtgaataagtctcttgagatctgatggttttgtaaagaggagatcctctgcacaagctctctctttgcctgctgccatccgtgtaagacatgacttgctccttgttgccttttgccattattgtgaggcctcaccagccatgtggaagtgtaagaccattaaacctctttcttttgtaaagtgcccagtcttgtgtatgtctttatcatcagaatcaataaattgataccagtagagtggggtgcagctgaaaagataccccaaacgtggaagtgactttggaactgggtaataggaagaggttgaaacaatttggagggctcagaagaagacagaaaaatattggaaaagttggaacttcctagagacttgttgaaaggctttgaccaaaatgctgataataatatcgacaatgaaatccaggctgaggtggtctcagatggagatgaggaacttgttgggaactggagaaaacgtgactcttattattttgtagcaaagagactagtggcattttgctcctgccctagagatttgtggaactttgaacttgagagagatgatttagggtatctggcaaaataaatttctaagcagcaaagcattcaagaggtgacttgggtactggtaaaggcattcagttttaaaagggaaacagcgcataaaagttcagaaaatttgcagcaggacaatgcaatagaaaagaaaatcccattttctgcggagaaattcaaactggctgcagaaatttgcataagtaaccaggagccagatgttaatccccaagacaatgaggaaaatgtctccagtgcatatgattgcatattacgaactatttttttaagctaatttttttttcttttgagacacggtctcactctgccacccaggctggattgcagtggtgcgtgatctcggctcactgcaacttccgccttctgggttcaagcaattctctggcctcagcctcccgagtagctgggacgacaggtgcctgccaccatgctcagctaatttttgtaattttactttcaccatgttggccaggcgggtctcaaactcctgacctcaggtgatccacccacctcatcctcccaaagtcctgggattacaggcatgagacatcgcacccagctgcatattacaaagttttgattaatcaccttaccatgttgattttcctgtagctactcattgcacctgtcttccattttcagagaatgcaacatgaggttctttgagttattcccttttattcagcaagtgtatcaatcagtcagtacatacttccacctgtttccatattttgactacttttctctgtgtttagctccctcagattgggaaccactattgtgaatctgaaaaggtgtgagtgtaatgggaagaccatagtaaaagcagaagaacattataagacattacttaccctcaatgacaagtcattagatatctggtattttaatggcaaataattgaacattcttacgtctaactttttcacttaaagtgaattactgttatatatttccatcatttagtttttcctctaatctattttttcctaacagaggaaaaattgacttcaataaaatcccatcctttttgaattccaacatttattctattagaatgtggattttattaactattttttccctaagcccatgtaacatagtgtttttaaatagcctcagggtaaatgttatgatttcaaaggcttcagttttgttaagtttttatgtcaccctcagactgctgtaagccatttttctcagagttaaaaagtccattcctttaaagttaattggcactgactcataatataatttacagttattttgctgttatgatttataccaactatgccctaaagaatattaggataattcaaagctacaaaacaaacatctgagaaagtattgaatagacagaataaatgaaaatattttatagggtatttgagactaaatgaagagtcagttaaaaaatgaaaagaggctattccaaaatgtgtaaattaattgagataagaagagtccatttatactagaagaaagctgctgaatttttatagaattatagatttgctagagaaaaagtaactatttgacctcttctttctttttttttttttttgagacggagtctcactctgtcacccaggctgcagtgtgcaatggtgtaatctcggtttactgcaacctctgcctccagggttcaagcaattctcctgcctcagccttccaagcaactgggattacaggcgcaaaccaccacactgagctaatttattattttttttgtattttagtagagatgtagtttcaccgtgttgcccaggctggtctcgaactcctgagctcgggcaatctgtccaccttggcctctcaaagtgctagggttataggcgtgagccaccgcgcctggccctatttgacctcttctacactgtagaccagacatggtcccaggatacatgtcactacaggtttatgtgaccagtaatagaggtgaccaagatgggggtgggtcagcgaaattgatctgcctgtggggctggaaattaggggatatgttttctgtagagaattttaaaactacatttaaaaagccaactcaaatttgttttgcatttttattgtcattctattagtgtcaatgataaaatgttcctttaggacaaggcagactgcccccatgttctctctcccttggcttgccattaatcaagtgtcaagaacgaagcctgtcttgggcgataccagtggtgcatttgaccataggataaagtggaatccagtggccactgtgattctcctttccactctcacggttacgagttgaggcagaaggagctgctgctgtttccctggacagtactacaatgaatttcataatagcatagtatttcttgatgagaatgggtaagcatagagcctgaagcaaaactggaacactgaaaaatttgtttcagagcatttaagattttaatttcttagagtgtttaatttgttactaagagacatggagagttgggttaaagagaaaaaaaaaaacttgaatctttgctgaggtagcttctcaaggtgttgcaaagtaacaactgtatttatgccttagttggctttgattttggctcagaaagtttcatattatcaatttacgttaacctcttccaggtattagtttattttccccttttcttttacacacagacacaaagtcgcaaacattaatttaggagcaagaatagaaaatattttttgagatgttactttacagagagctatttttgcttgacacctttcctttctacatgcagtgaaatacatcgtgattgcaaagggtgaagaagtggggtttgtgcacttttgagtgtgtattgaaaaatattattattcatttagtagctttgtattacttgacaggctgtataaattctgacatttcccagtacaattacatataatacagggatagtcaaatttacacatatatacaaacatctataaatgatcatcatcaaaaaggcaaatacatttttaagagataacccatgacttttctttcttattatttccataagcaattgtagtcttttctttaaaaatgccatgactcaaaagaatttcagaagtacctgcttcaaaatccacttaatactggagtcactgtcaataccaagaatacacagagtaaagatggaatcagttgctcataatattctctaccatcgctgttcaatagaaacctgtgatgttaataatgtgccatgtgctgtctaatacagtagctactagccacaggtgactatgaagcacttacaatgtggctatgtaactagcaactctacttataacattttaattttaattaccttaaatttaaattgtcactggaaactagttgttaccatattagccaatgcagtatgtgatgttccatttaaatggactctgtatgatgtttattctccttgcttttaataacaccaggaaaaggtattgttttcctttctatattttagctaagataggctgttcaatgacacagtatatcttgaaattacagtggcttaacaaagcaaagtttgatttctctccaagtccagtgacatttggtggatatgctcaataggcatttatgattcaaagtgttttactccatttgggctactataaaaataacataaacttggtagaatataaacaatagagatttatttctcacagctctggaggctaaggccaagattaggtgccagcacattcagtgtctggcatggatccgttttttggttcagatatggatggcaccttctcactgtgtcctcatagtggaaggggtgaggaatctctctggggcctcttttataagggcactaatctcattcatgaggactccactctcatgaactaatcacttccaaaatttccaccacctaatactcttaccttgggggttaggatttcaacatgcagcacaaacattcacctggtagcacaaggtagaggccacttctatcttgcagctctgctaagtcatctcatggccacagtagctgcagcatcagtgaaagagaagttgtggagaacgatcatggctcctaagactctcatcagaagtgacacacgtgacttcccttcactgttcaccagtcaggacagtcacaaggcttccagaaacctccaagaagtctggacagtcttcttagagcctaagaagcatagagacagctttgcagtgagcgcaagtaatcattattcctccatatgttagctttgagatcagggacacatcagtgagactctccaagtttcagttgctttatctccttgaaacagggatattacaactgattacagaaaatactcaaggattacataggataatctcacagaagtttcatagcacaggatcttcctcatagtaaatgttcaataaatgttacttctattgtttttagatcatcatttatttccaatgccattttttcctttggcttaagtttaaacgcatacaccctgatattattcacttttaatttcatttagtgctatgtttgcattgcatttttttcttaaagattatttaggggaaaaattaaagaaaatatgaaatatgataaaactcttagaatacctgtagatacaaagcatttattatctagtcatggtatgcatatttggtaactgaattaaggcagaaatgcatattaaactttaacaatgtattggtggaggccgggcacggtgactcatgcctgtaatcccagcactttgggaggccgaggcaggtggaccaggaggtcaggagatcgagaccatcctggttaacacagtgaaaccctgtttctactaaaaataccaaaaaaaaaaaaaaaaagccaggtgtggtggtgcgtgcctgtagtcccagctactcgagaggctgaggtagaaaaatctcttgaacctggaaggtggaggttgagttgagccaagattacgattgtactagcctgggcaacaagagtgaatctctctctgtctctctctctctttctcactctctctgtctctctctcctctctctctctttcctctctctctctctctctcattcctagaatgtgtgaacattagggtaatattttcctgtccaattttagcacaatttacaggatgtaatggctcccacctgtaatcccagcactttgggaggctgaggtgagaggattacttgagctcaggagttcaagatcagcctaggcaacatagtgagaccttgtctctactaaaaacaaaaattaaaaaaaaaaaaaaagccaggtgtggtggtgcacacccacagtcccagctatttgggagggtgaggtgggaagattcctgagcccagaagattgaagtggcagtgagccataatcccacccctgcactccagcatgggccacagagcaagactctgtgacaaaaaaagccaaaataaaataaaaaagttcaatctaggagtaaaataattttttctccttactttatttcagtaataaaaattctgtaaatctaaaatcccaaaaaaacaaaaccatagaatgttttcaggcatggtatgggcaattttgcatgtgtggggtggcactaaatgagaattcaccatgtaaaatgaatacttgagaaaatattagaatcaaaagatgtttctgtaactagagggcaagttccagctgctcccaggcgtatctaaatcatgcattcttgctttaggggatatgtgaccttcatatttgcaatttttaagaaatgtcttttcatgcttttcatagtaaaataccctgtgtttttaaaatttaattgtgtgtaatcagtttcaaactagtattcgtatcctgcttgattagtgtctttcattttaatcagagttcaacacaaactggttacattttttatgtgaatatgctagaaagacaaaagcagagacagtcatctaaggttgtgactaagaccgattgaccaatgttatgtctcattaaggtacagtgcaagctgagaagagttttaatccaatatttgagagcagaagcagattgtggggttcccctgacattctttctttttcttcctgcacaattattctcatgcccaccgtcctgttttacacacacacacacacacacacacacacaccctagtacatactcctctctgtatttttttttctttttacatttctctgatgtggttattagtatggagccagtttcaatcctgacttgggcatggatatgttccaaaagtgcctgttatttttatatgattttggccgccattctttcattcataaatagtttgagactgagaaagtataaagaataagcaaagtctaatccagaaatatcacctatcaattggtgtattccatctttagcaatctcctttccaataagctgctatttatctgtaactgtcctaccttagatgtaatagtttttaccgtgtccaaatataaggaagaaattaacttgagtaattttacatatggctctagttatctagtgtgggtttcacaatgtcttcatctattaacttttatatcattttgaatgtaagtattcttttatgaagcaatattttttcaacatataattggaaattagaattccatgcaacttcataaatgctgatttaatatcaagaacttaatttaggttagttagaaaattgagcctcccggttgccacacaatgcatatgggtgtgtgtacatgggtttcatttacttttcagccctatataatcaccttgttactctaaactttacacctgaagcactgagcataagagacagtcattaaccagaatgagcttgtttcccaagttcttataaaattaattatccccataattttcttgttactacttctaaaacttattaagatatgtctgtgtgtttacctcaaaattacaattaaatgtgaagttacatgcaacccaaggagtctctaatttgtttcttttctaggtgggaggattttcaaattaaattatgttctccgtaccttaatttcatgttgacaaaatcagaaaaaaataagcaaatatacaacagatgggcaatgcttttgtaagcatggtgttaatattatccaaggagacactccagcaaaccatgtttttcaaatcagtctgttctggcataagtttttaggcaaaattactcattagcatttaatccagatggttttgggcagtgcattttccttcagcaactgtcaaggtgctgtacttcgagtaagtgacaatggatacccggattcttcaaagtcaaaagagtcaattttagaatggagtgtaaaccgttattcctagagtgtgtgaacattagggtaatattttcatgtccaattttagcacaattttaacaccatctcatagtgataaatatatgaaacataaattgaaatatgaaatatttaaatccatgtaatacaaaggatgcatctaagcataattttcataacaatatgtatatttgagctctacatgttttataattttttataaaacatgaagatatatatatatacatataattttttttttttgagacagagtcttgctcctgtctcccaggctggagtgtaatggcacgatctcggctcacttcaaactctgcctcccaggttcaagcgattctcctccctcaccctcccaaataactgggattacaggcactcgccaccatgctcagctaatttttgtatttttggtagagacggggtttcaccatgttggccaggctggtctcgaactcctgaactcaggtgatccacccgcctcggcctcccaaactgctgggattacaggtgtgagccaccatgccaggccaagatttatatattatatatcagtctgagtacagctatccacttaccctccttttcaaggtctcattaaatgtgaggatttctgaagttcaataaaggccacaaaaaagtatactaacaatgacagtataaaaaaataaggccaggtttggtggttcatgcctgtaatcccagcactttgggaggcccaagcaggaggatcacttgagcccaggcgttcaagaccatactggagaacatagggagacatcatctctatgaagaataaagaaaaatagcagggagaggtggtgcacacctggggttccagttacttgggaagctgacgtgggaggatcacttgagccaggcaggtggtggctgtaataaactatgatcacaccactctactccaacctgggcaaaagaaggagaccttgtctcaaaataaaacagatatgtatcaggcaaaggttgtttgcaagtaaaaaaaatcatatctacataccaatttaagcaaaaataatttactacagagaatttggtaaacacaaagattgttagaaagtctaaaatagcaggctttatgttcgcgtcaagtaatgagtccccagactataattgaatccagcataataactgttgcctgttgaccccaggaacacaattcctacaatctaaggattagaagatcatcatcagaactggggtctttagagcaagatcatctatgctacaattctcaccagcaaaatgaatttcatgattacccagcctgtctttccgcattcaactcacttttgaatataatttgtggaacccaatttgcaagggaatttaggaaatttaggttttaatttgttttgcttttaactttccagcctcttcagtggagggaggcatagtaaaagagtattgggttacatgaccactgagttaattttccattgctctcacaggctgctgaaagtggtatttagaatatttcagaaaaatggaaattaacaaggatcagatcaactgatgagctacagcagagcccagcacaacacaccaaagacagagtaattctttgctaggtagaaacagaaaacattaactgaagagtgctcatataaaatgggaaacttaattgtaaatgggtatgctttcgacctctccactgaccagttatcccccttatctattccgtctcctcaagtatttatattctctattccctgagacacaatatttaaattaggccaattaataactccacaatagcctctaaatgttcaagtgaagggaggaatcacatgtctcccactttaaatcaaaagctggaaatgactaagccaagtgaggtgggcatgttgaaagctgagataaggtgaaagttaggcttttttttttttttttttttgccaatagccaagttgtgaatgcaaataaaaaggtcctgaagtaaattgagtgtgctgctccaatgaacacacaagtaataagaaagtgaaactgccttattgctggtagagggaaagtttggtggtctggagaaaagattaaactaggctcaacattcccttaaccaaaaaggtgatgaagctgtagaagaaaagtctgaagcttgttaagattagttcaggagatttcatcaaggaagctatctctataacctaaaagtgcaaggtgagacagcaatgctaaagtagaagttgcagcaaagtcatccagaatatctagctaagataattgatagaggtagatatcctaatcaacagattttcaaagtagataaaacagctttctgttggaagaagatgccatctaggacttccatagctagaagagagaattcagtgcctggctttaaagcttcaaaggactggatgactctcttgttagaggctactgcacctgctgactttaaatggaatccaatgctcatttaccattctggatatcttagtacccttaagaattacaccaattgcctctgcctgtgctctagaaatggaatacaaaaaagcctggatggcagcatgtctgtttacagcatgttttactaagttttttaagcctacaattgagaactcttactcattcaaaaagatttctttcgaaatattactgctcattgacaatgcactttgtcacctatgagatctgatcaagaaatacacgaagattaatgctttcatacctgcaaatacaacatctgttttgcagcccatggatcaaggagtaatttcaactttcaagtctcagttttatgaaatacatttcataaggctatagctgcattcaatagtgagttctttaggagatctaggcagagcaaactgaaaaccttctgaaaaagaattgccattttggatgccattcagaatattcctgattcatgaaaggaagtgaagatataaacattaacactgttttggaggaagttgattccaaacctcctggatgactttgaggaattcaagacttaagtgaagaaagtaactgcagatattgtggaaataacaaaacactcaaattaaaagagaagccttaagatgtgactgagttgctataactttatgatcaaatgtaaatgcatgagtttttttttttcttatgaatgagcaaacaaagtggtttcttcagatggaatctactcctggcaaagatgttgtgaactttctcaaaatgacaataaataatttagagtattacataagcttacttgataaaacaatagcagggtttcaaattgactccaattttgacaaaagttctcctgtgagtaaaatgttatcacacattattgcccactacagataaatcgtttgtgaaaaaaaaaaaaagtaaacccatgaggctgatttaattgtcttatttaagaaactgccacagtcactccaatcttcagcaacgatactctgatcagtaagaatccatcaccatagaggcacaatcctccaacagacaaaagaatatgacttgctgaaggctcagatgatggctagcattttcatcaataatgtacctttttattaagacctttatattgtttttagatataatgctattgcacacttagtagactatagaatagtgtaaacataacttttatatgcactcagaaaacaaaatatttatgtgattcattttattatgataattactctattgcagtgatctggaaccaaacccacaatatcttcaaggtatgtgatatagtttggctgtgtccccaacaaaatttcatcttgagtcgtagttcccataatccccatgtgtcaaaggcaggaccaggtggaggtaattgaatcatggggtggtttaccccatgctgttctcataatagtgagttctcatgagatcttatggttttataaacatctagcatttcccctgctggcactcattatctctcctctgccctgtgaagaggtgccttcttcagattgcaagtttcctgaggcctccccagcaattcagaactgcaagtaaattaaacctctttcctttgcaaattaccctacatagcagtatgagaatgaattaatacactaaattggtacaggaaacagtgggttgttgctataaggctacccaaaaatgtggaaacaactttggaactgggtaataagcagatgttggaacagtttgtagagctcagaagaagacaggaaaatgtggaaaagtttggaacttcctagagactttttaaatggctttgaacgaaatgctgatagtgatagggacaatgaagtccaggctgaggttgtctcagataaaaatgagaaacttgctgggaactgtaaaggtcactcttgtaatgctttagcaaagagactggaagatttctgctcctgccctagagatctgtggaactttgaacttgagagagatagttcagggaatctggcagaagaaacttctaagcagcaaagcattcaagacgtgacagagtataaaagtttagaaaatttgcagccagtctatgcagtgggaaagaaagctcattttctctggagaaactaaaatctgctgcagaaattcacataattaattaggacccaaatgctaatcaccaagacaatagggaaaatatctctagggcatgtcagaaaccttgcaggcagctccttccatcacaggcccggaggtctaagaggtaaaaatagtttccttcctggaccatgccaagggctcccagctctgtgcagtctcaagacttggttccctgtgtcccagctacttcagctccagccatggctaaaagaggcaaaagtacagctcagggcattactttagaggatgcaagccccaaaacatggcagcttccatgtgatgttgagcctgtgggtgcattgaagtcaagaattgaggtttgaaaacaccacctacatttcagaggatgtatggaaatgcctggatgtccaggcagaaggttgctgcaggggtggagccctcatggagactctctgctagggcagtgcagaagggaaatgtggggttggaacccccacatagtgtccccactggggcactgcctacaggagctgtgagaagagggccattgtcttccagaccctaaaatggtagatccactgacggcttaacaccatgcaactggaaaagccacaggaactcaatgccagcctggaaaagcagccaggaggggagctgtaacctgcaaagccacaggggcagagctgtccaaggccatgggagcccacctcttgcatcagcgttacctggatatgtaatgctggaatcatggagtcaaaggagattattttggaactttaatgtttaatgactgccctactggattttggacttgcatgggacttgtagcctctgtgttttggccaatttctcccatttggaatgggtgtatttactccatgcctgacctccattgtatctaagaaataactaagtttgctattgattttacaggctcgtaggtggaagggccttgccttatttcagatgagactttggacttggaaatttgggttaatgctggaatgagctaagagtttgggagaatgttgggaaggcatgattgtatttgaaatgtgaaatggaggtgaaatttgggaggggctaggggaagaatgatatggtttggctgtgtccccacccaaatctcatcttgaattactgggattagttcccataatccccacaagccaagagcaggtttaagtaaaggtaattgaatcatggggctgctttccctcatgctgttctcctgatagtgagtgagttctcatgagatctgatttttttaagtgtctggcatttcccctgctggcatttattctctctcctgctgccctgtgaataggtcccttctgtcatgattggaagtttcctgaggctttcccaataatgcagaactgtgagtcaattaaacctttttccttttcaaattacctattctcaagtatttcttcatagcagcatgaaaacggactaatacagtatgtctgtataaaaaaaattaataaaagattcaaaagcaagacccagatgctaacttaatcatcctttatgagacggggtttagtacttactgacaaaactttatatgttaagaaatagaagaatagttgttaaagaagcaataaaaactaataccattaacataggtcacttctgtgaattgagattaaaggtatagtgaagaaaggaaatgatttagttttcatgtgtatgttgtgtattatttataaattagaataatctgaaactgtttccactgacctcccagttattcactttttttttttgccaaacatatgagaagtggattttttcattcaactgactctatccatagggaggagaagcacaaatatttcagcaattacttgatcctatacttagatcctatacttagttttggtctactcgtttacacgaagtgagtatatccattacttgaatttggtaactacttctctgtggatgagtcccctagtctctagtgtagttcagtgtcttctcctaaacttcagactcagtacagagctcatctcatctttacttgaggaactcacagtcatcttaaactcatatccaatactgactatctaagttgttggaatcatcggtgaactaaaagaataattagtcttagttggtagttctcccatacaaataaacctttaagttctttttatttaatttttccatgcaaatatttaacattgtcttctatatattttaattcattgttttattttagcctttcatcttttctgatctagactcctacttatcatctcctcccatatcctctgctctcagacatatttacaacatggccaccagagatctacctaaaaataaaatccaagtatgcttattctttgctggaaagcattcaatggctccccttaacctagaatttataggtgaaagccatactgcaatgattatgtgaccctccatgttatctgtgtcttcaaacctttttaaacttcctccgttgtattttctgtttggacaattttgaataacttaccctatcctactatcctacatatatgcaaataccacattgtttcttttttccacacctatgttatcttctcactgtcctgttccttaggctcttaacctgctctcaagtggtctgtatgacttgttgtccatggctggtgatgtacactttctaaatactcacatccacatatgaccatgtgtacttagtacacattttactttccagtttgtcttagaataatcttttctgtggatctatttttcaaccagattgctgacttcttggtgtctgcatatatgtcttgattactctcatcttgttaacaacatcaaatcaatatcaataattaaataattatttaatgaacaaatggcccattggtggttctgttattaatggcacaaaataactcttacatgtcagaagggatgttcttaaactgtcagtacttctaagcacttaaatgaacacctttaaaaataatcatagctaagtgtattgcatggaaattatttttaagagattgaaaatgataactggaatatttaatgcagaggagggtaaataagaaactttttttctcattttgtgggttgctccagtcgtaagaaaactgtttttttgagcaggtgcctccagttgttagtctgcaggaggttattcaaaactggggcacactgggttagtttccatggaagcagaaattaacccccaggaacctcatacgtttttagcaccatccggaggacatctggtatagcacccatcagaaacaacaactgaggcaaattcccactataaaatacaagtagaaggaagagcagtcaccttcataatcatttcttacactactataaatcttcctttgaaatgatgtatgttttatcagaatattcagagtaaattgctataatttaattttttgaagtattcttttcccaaatcataaattatcttaatgtaaattattatagactagtcataaatatttaagattgataaactttttggcaaatactttatccgtgcttttactcttcacatggataaatttaaaatttttcttttttaaacatttatatatgccttagccatatttttcaagaaatgtttcaagaactcagaaaaagattggacaaggattatacacttgttaggaaaaaattcttttaaggattatattgaatttatttaacaatctctgccaggcattgttgaagtgttttgtaatactgtctcatttaatactacatatttgtaaacattaacttatttaattcttataacaaccatataaacggaaatattatcatctactccctttcacaaataaggaagctcaggctgagactgattatgacattttgctatgtcaaacagttaaatggtggcaaagtcagaattttactggtcagtctggaaccagagttcaagccacctacaactatatcatgttacttccctcttgtttttgtcaaagacaggaaatgaatgttccaagaagcaaaggactaaggagggctgtgtggatctcatctcatacagagatttgagattttgaaagaatgaaaaggacatgaatggaattcttatcacagattcttcctcttgtattttttattgttctcatctggaatctggaacttcttaagcttctctttcagccctttatttctgtgaccttcactgcagtaagattgcctggtgaacctctacatcataaagaaataatttcatttaataaccagatctgtagcaaaactgcctcttgctttctcacatctattttaacattgactttgagaagtacaatgaaagaattaagaatttaagcagaacagtatcctgttgcagacattgtaaatgtcaatatattgcaaaattaaactaaattcaaaatagtatttttccagctatatcaattgaaatgtcctgggatcaattttattccatgattcatacaagcatctgaattcttgtttctaatactgtttcccactaaacagaatcacgactccttagagaaatggctgatttgatatttgatatttgaaaggtaaaaggttagcctcaaacacattgctatgtcagaaaccaagacgtcttttaagtataaaaggttcatgttgaagggccaagctaaacttacagaaacattggccaagtagagacaattttagattaaaagaatattaagtttgtctaatttacagtgaatatgaaaaattataaataatgaaacaaaaaatactatgttaaccaagtgtattaatgaagatgaagaaaacaatgcatttccattgagtcttgttcattaatcattttgttatcactgactaatttattttaccaagaaaaatgtaaaaattagtaaatataaataaaatagttagaaagcatggtctaacttgactgacttggaatgaccttctgttttcatggctggtcatgcaagtatcctaaattcaactggatacagttttaagtacctttaagagttttattgccctaagataatagaatggtgaacatttatgaggttcaaatgaatttataattacatattttaaagctaggacattcagaacggcagagtgatgatgtggggaggtggaagacaccctccctactaaatagccattaaggatgtggaaatcataagcaaccatttgaagtctctgtaaatggtgctaagggcatacatcaaatggagaaacatttatttaggaaaatctgctctgtctcagtagaaacaatgccggtggtgtttggccacaacttgttcccttcaactgcagagcggtatgatggaagctctacttcagcttggtgtaattaagaagatgatctccttctccctataggtttcatcacagtttgggactacagttttatctagggagggacagagagcagaaactcttataccacctaaccctgtattgcagaagctgtatttcagcaaatccatcgaagagcagagcactggtgttcatctcccctacaaagccctcaagagtaacataatacaaaaatactggactccagtcactgtgacatagttcacacttttgatgaaatttccaagactgactaatgttcccttaaaataaggaataaggcaaggatgtcatcactcaccacttacgttcaacattttattagaagtcctaaacatggaaattaggcaaaaccatgaaataaaaagccatttaaattggaaaagaagcattaaaattatttttatttgtatatggaattataatatatattaaaaattactatagactaaccataaaagtccaaaaatgaaattaagacaataatgccacttgtaatagtatgaagaataaaatacttagaaataaatttaacaaaacaagcttgatacttttacactgaaaagtaaaattaaatattgaaagaaattaaagaagatctaaataaatggaaacacaatccaagttttgaatcagaaaacagtatttttaaggtggcaatattaccaaaatcaaaaaatccatgtgaaaaccctggatttgttatatgacaaattgatcctaaaagtcatgtggatatgcaagtgttatggaataaattttgttcctcaaaatttatattaataaagtccaaaccactagtatctcagaatttgacagtgtttagtattagggtctttaaagaggtaatgaaattaaaatgaggtcaccagagtgggtcataatctaatataaattatgtccttgtaagaagagaaaaattgaacacaggtagacacagagggaagaccatgtgaagacatgggagaagatggacatctataagtcaaggaaagaggcttcaggagaaattaactctaccaaaaccttgatctcagatttaagtcttcagaatagtgaggaaatgtttttaagccacctagttcatagtactttgctttagtaaccctagcaaattaacacaaaaagaacatagaatacccaaaacaatcttgaaaaaggaaaaaagttggaagtctcatacttccagatttcataactgactgtgaagctacagtaatcaaaacagtgtgatactgcaatagaatagacatgtaaatccatgaaatagaactgaaagtacagaaataagttctcatatttacagtaaatcaatttttacaaaggtgccaaaccagttctatatataaaatatccctttcaaaaaatgatgctatgatgactggatttacacattgaaaagaatatgtaagagtccttcttcacaccatacactgaaatttcccaatcatatattggagaaattaaatgtaagagattaaattaaaaattttttattatactttaagttttagagtacatgtgcacaatgtgcaggtttgttacatatgtatacatgtgccatgttggtgtgctgcacccattaactcgtcatttaacattgggtatatctcctaatgctatccctgccccctccccccaccccacaaccaacccaaatgtccaacaatgatagactggattaagaaaatgtggcacatatacaccatgaaatactatgcagccataaaaaatgatgagttcatgtcctttgtagggacatggatgaagctggaaaccattattctcagcaaactattgcaagaacaaaaagccaaacaccgcatgttctcactcataggtaggaattgaacaataaaaaacttttagaaaaacaggagtaaatcttagaagaaaacttaggaatatatgattttaagttaagcaatgatttcttagatctgacaccaatagcacaaatgacaaaagaagaaaaccataaattatacatactcataattttaaatttttgtgctgtaaatgatagtatccaggaattgaaaacaaagagaatgggaatcaatattttaaaattatgtatctgataagccatatgcttccagaatacataaagggcacttacagctcattagtaaaaatataaataatctaattaaaaatggacaaaagatcagaatagaaatttcttcaaaaaaatgttaaatagccaataatcacattaaaaattgctcaacataattagtcaaatgggaaaatgcaacacgaaactgcagtgagatgatgcttcatgcctcctaagatggctatgatgaaagacatctaacaaacattgtcaaggatgtgaaaaaatgttatcctcataaattcctggtggtaaagaagtgcagctgttttagaaaacattctggcagttcctcaaagggttaaacataaacttaccatatgacctagtaattccacttctaggtaaatctaagagatataaaaacatttgtccattcaaaaacttctacattaatcttcatagtaacactattcttaatagccaaaaggttgagacaacctcagttttcattaacaatggataaataaaatgtagtatattcatacaataggataacattaatataagaaataaagtattgaagtatgctccaacatggattaatcttgaaaacattatgctaagtgaaaaaagtcagccacaaaggactacatattgtatgattccatttatctgaaacgtccattaaaggcaaatacatacaggcagaagttggactggtggttgcccagggctggggatttcaggtgcaagaggaaacaactgctaatgaatatggagtttcttgttggggtgtcaagtacgttgtgaaattttttttgccacgatggttgtacaactcagtgaatatatattttaaaaaacactaagtagtaccctgtaagggaataaattgtatgttaagtaaaatatctcattaaaattgtgtcaaaattatagttctaggatccctttaagttaaaatttttagggctaacaggaaaaaactttattaatatggttagaagctacagtcttctattaaaggaactaaataacctgaacaactagaggtggcataataatcattccccttttggagttatggaataattcatagaatgactataaacagagcttagcacattccataagggtctcaaacaaggatttgggaaacctcagatttaagtcttggtagttggtaaaaaacaaatagaaaaaaaaaacaaaaaatgtggtaagtagtctctaaagataatgataattatgtgagctcaatttaattgacagtggggcttacaccatattcttccaatgcttacagtcattgctcaaaactaccttctcttttgacgtccttttctacagaactgagggcttctagacaaaggctcgacttcacaccatcatagccatatcagctgaatcttctgtcaattagtaataccacaaaaatatggaaagcccagaaggacagtgttatgtttctagtacacaaatagaagctttaggattgcagttgaaagggagaatagctgtggtatccacagttaactgagtgaagaccacaataaagactcaaaaatggtgtagtgaaaaaattactggacaataaattcaatatggcatttacaatcttgttttcagttgagtgattctaacaaagagatcttcttttgacaatatttattttcttcaaataattatactgaagaattactgttctcatgtaatatgcaacagtgccattgcctttgtggaattccctctcctacaatgtgaattggatttagagactccccatgtaacaaatacaaaaaacgagaagttagtggatgtcaatccactattaggacattgtattagtccattttcatgctgctgagaaagacatgcctgagactgggcaatttactaaaggaagaggtgtaatggacttagagttccacatgacttggaaagcctcacaatcatggctgaaggcaaagaggagcaagtcatatcttacacggatggcagcaggcacagaaagagtttctgcagggcgactaccatttttaaaatgatcagatcttgtgagactcattcattaccacaagaactgtgcaggaagccccgccccccataattcaatcacttcccaccaggttccttccacgatatatgggaattatgggagttataattcaatatgagatttgggtggggacacagtcaaaccatatcattctgcccctggccccttccagatctcatgtcctcacatttcaaaaccagtcattccttcctagcagtcccccaaagtcttaactcatttcagcattaactcaaaagtccagagtccagtgtctcatctgaaacaaggcaagtccttctgcctatgagcctgtaaaatcaaaagcaaattagttactttctagatgcaatggggatacaggcatttggtaaatacacccattccaaatgggagaaatttgtcaaaacaaaggggctacaggttccatgaaagtctgacatccagcagggcagtcaaatctcaaatctccaaaatgatcttctttgattctatgtctaacatccaggtcacaatcatgcaagaggtaggttgccatgctattggggcagctctgtccctgtggctttgcagggcacagcctccttctgggctgctttcacgggctggctttgagtgtctttggcttttccaggcacaaggtacaaggtgtgcatggatctaccattctggggtctggaggatggtggccctcttcttacatctccactaggcagtgcctcagtagggactccaagtgtgagctccaacccatttcccttctgctctactttagcagaggttctccatgagagccccaccactgcagcaaacttctgtctggacatccaggcattttcatacatcctctgaaatctaggtgaaggttcccaaatcccaatttatgacctctgtgcactcacaggctcaataccacatggaagctgtcaaggcttggggcttgcaccctctggagccatggcttgagctgtaccttggctcattttagtcatggctggaatggctgggacactgagcaccaagtccctagactggacacagcatggggaccctgggcctggcccacaaaaccattttttcctccttggcctttgggactgagatgggagggggtgccgtgaagacctctgacatgccctggaggcattttccccatagtcttggggactaacttgttatttatgcaaatttctgcagccagcttgaatttctcctcagaaaataggattttcttttcatcacattgtcaggctgcaaattttctgaacttttatgctatgtttctcttataaaactgaatgcctttaccagtacccaagtcacctcttgaatgctttgctgcttagaaacttcttctgctaattaccctaaatcatctccctcaagttcaaagttctgcatatctctagggcaggggcaaaatgccaccagtctgtttgctaaaacataacaagagtcaccttacatccagcttgcaacaagttcctcatctccatctgagaccacctcagcctggattttgttgtcaatattattatcagcatcttggtcaaagccactcaacaagtctctaggaagttccaaactttccacattttgctgtcttctcctgagccctccaaactgttccagccactccctgttacccagttcaaaagtctcttccacatttcctagtatcttttcaacaacgacccactctattggtatgaatttactgtattaggccattttcatacgctgataaatacatacctgagactggacaatttccaaaaaaagaggtttactgttccacctggctagggaggcctcacaatcattgtggaaggcaagcagacacaattcatatcttacatggatgacaccgggaaaagagagagcttgttcagagaaactcccatttttaaaaccatcagatatcgtgagactcatttactataataagaacaatgcaggaaagacctgctcccataattcaattccattccactgggttcgtccttgaattgtggaagttacaattcaagatgagatttggatggtgacatagccaaaccatatcagccatgaaagaccatgagagactctctctctttttgttccctctctctctatcttcccttaatttatgctttctgtctctcagatttcttattctggggaaagcaatatctcacacaatgagaagttctatggagaggcccacaaggcaaggaactgataatttcaggcaacggctttgtgaatgaatttagaagaggattcttgcccagtcaaccccagagataaatgcagtcttggttgataccttctttacagccttagaaagaccttgaacaggaaacacccagctaagcccctttcagattcctgataatcaggagctgtgtgagtataagtatttttttactttaaatcactaaattttgtggtaatttcttatgtggcagtagataattaattcccctaataaagaaattataatagactaaggagaatgagctataaatgtgtacatttatatatccacagagggaagaatgatcagttattttttactcccccaaatcaataggagattatgtcacagattctgacatttcaaatcttttcaatctttacttacaaatactctgatgattttctccctcgctgtaaaactcttttgtttattcttctgaacaaatattgtgagtctccttattttcacacatatttgaatctttttttaacaaatataagttttacaatatttaatttatcagacttgtttttgaaatacatattaaatcttgtttactctgtctcctttcttcaaatatacatttaaaatatctttaaaaattcatatgtacttgactttgtatctttacattcctcacattttcaaactgtatacttcaatcactttaaatatgtatatacatagatatagatattagccaattcttttatgtttgtgtatttgtgagtaaaagagccttcttattctatggataccagaataaaaaggcaggaggtgattgctagtatcttggattttatttatgtatcaaataaagacagctacgtgttaagacatggtgtgttcagtatttcagtttcttcctttttcaatcttgggagattgtgtgtttccaggaatttattaattacttgtaggttttctagtttgtgtgcaaagagttgttcacaatagtctctgatggtgtttttgtatttctgtgaggccagttgtagtgatactttatcatttctgattgtgcttacattaatcttctgtcttttgttttcttaatctagataatggtgtatcaattttgtttattctttcaaaaaaatttttgttttcactgaaagtttgtgtggattttcacaccttaattttgttcaggtcagctctgattttggttttttcttttcttctgctagctttggggttggtttgctcttgtattttttgttccctttagtatgatgttaggttgttaatttgagacctgtaactgtatggttttgggagatcttcttgatatcaactgctatttttattttaatgtggtcaaagaatatggttggtataattttgattttttggaatttttgagacgtgccttgataatctgtctaacactgtctgcgaggtgttgaaatctcccacttttatcatgttggttgtctaaatctatttgtaggtctctaagaactgtttttaaatgtgagtgctccaatactgggtgtgtatatatttaggatagttaggacttcttgttgagttgaaacctttattgttatgtaatacttttctttttcatttttgattgttgttggtttaaagtctgtttatctgatcctaggtatcaagccttgctctttttagttttccatttgcttcttatttcttttcatccctttactttgagcctatgagtgtcactgcatgtgagatagatctcttgaagacagcatacaattgagtattgattttttattcaacttgccactctgtcttttaggtggagggcttaacccattcacattcaaggttaatattgaaatgtgagaatttggtcatatcatgttgttatctggttgttatgtatgtttgattttttagtttgtttatagtgtcagtgggctatgtccttaactatgtttatgttgtgtcaggtaataaccttttatttccatgtttaccattccctcaaggacctctcataaggcaggtctagtggtagtgcattctcttaacatttgcttgtctgaaaaagattttagttctcctaatctttgaagcttcattttgctaaatatgaaattcttggttggcatttattttcttttttgttaattttgagacagaatttcactctgtcactcaggctggagtgtagcagcgtaatcttggctcattgcaaccttcacctcctgggtttaagtgattcttatgactcacccttccgagtaactgggattacaggtatgtgccaccatgcctggataatttttgtatttttattagagatggaatttcactatgttggccaagctggtctccaactcctggcctcaagtgacctggccaccttggcttcccaaataactgggattataggtgtaagctactgctcccggtcagaatttcttttctttaaagatgctgaatatatgtccccaaactttcctgtcctgtagggtttcttctaaaatgtctactgttaacctgataaatttcccttagtaggttacctgccccctctctttaaatgcctttaacattttttttcaggttggccttgaaaaatctgatgactaagtatcttggggatggtaatcttgcataacatcatgcgagggtgctccgaatttcttgaatttgcattttgaccattctagagacattgggaacattttcatggacaaaatcctcaaatatgttttccaagttgcttactccctctgcttctcttccaggaatgtcaatgaatcttaggttgagtcagtttgaataattccatacttttcagaggttatgttaatctttttaaattcttttttgttctttatttttgtttgcctatatttattcaaaggtttgaccttcaagctctgagattcttttgtcaggttagtctattctattattaatacttctaattgtatattaaaattcttttggtaagttttttgattccagaagatcatttgtttctttcttgaaaggactatgtcctatttcagagtttgaattattttatctcacgagcctcctcgccatccaaattttgattctatgtctgtaatgttagccagtaactagttcaaaaattgaaacagtaataaaaaaccttccaaaccaaaaaagcatgaatcagatggattcactgctgaattctaccagatgtacaaagaagggttagtacccatcctactgaaattattccaaaaaaatcaaggagaagggactcctcccagattcagtctacaaagggtgcatcaatctgataccaaaacatgccagaaacataataaaaaataaaactttaggtaggtcaatatccctgatttacatagatacaaaaatactcaacaaaatactggcaaaccaatccagcagcacatcaaaaaattaattaactacaatcaaataggcttgattcctggaatggaaggcaggttcaacacacataaatgtgattcaccacataaaccaaattaaaaacaaaaaccacatggtcatcttaatagatgcagaaaagagttttgataaaatttaacatatatttatgttaaaaaccttcaacaaattaggcattggaaggacatacttcaaaataataagaatcatctatgacaaacacacactaatatcatactgaatgaacaaaagctggaaacattccctttaaaaactggaacaagacaaagatgcccactcttaccactactattcaatatagtgctggcagttctagcaagagcaatcaggtgaaagaaaaacacaaatggcatccaaataaacaaaaggaagtttgctgatgatatgattctatacctagaaatctcactctgccaaaagcctcctagaagtgataaacaacttcgttaaaggcttgggatacaagatcaatgcacacaaattagttccatttccgtaactaataatgtcttggcattttgtaatttaggaatttgaaatttgagcttgatgaatgagtaaaactgattctcacactgatctacagcagtcaatgttcttgtatacaaaacatcagagattgtattgtataatttgtaaaccaggaaagtaacttttaactaaagcaaatatgcataaaatttattttagtatcaaaaaaagtaaagtcatacttgtaggattatttattctaaattattctagtaataatttatattcatcaactagataagatattgttagaattaaaatggaaaatatgatgattatggatttaaaattttatagttaaaatgtcctagagatgtatgaacattttagtataacattacaccaatgtattacaacaaactcggttttaaaaataaataggctaattttaaaacaaaacaaaaaaaaactagaacaatagaattcaggaatcaaggattccagtgaataattcattttttggtggatccaaatgtcaacgtatttataaatttgttttgacaaaaacttatctggaattctctactttaattaaacttgtgtaaagtgatagaacatatttcagtctaatacatcattttcacaagtaaaacttttattttggggctaagaaagtaattaaatgctgaagaattgatcacaaataaagtggagtatatttcagtgaaaagaaaaagcttaaacaagaagcatgattagcacaaatcacttgaatgtatgaatatctggaaaaagtttagttagggtcagaaaatagaaaatagaatgtgacgtgtgaaatcattaaaacgatatttaaatgttaaaatgtaaattgaggctaagacaactgaaacaattgaaaacaataaaatagcttaattttttcaaaagaaataatagaatcaacttactaattaagaaagctaaaaatgatcctccatgctcaattaataaataaaccaagaacctggttttgtatataaattaaacataaactttgtacatatttttatctgataaaaatatggcatttatatatgggcaaagccaaattttggattatattgaaaagcaaattttcatagcttggttagatcctgtttaatgctaaaccatttacttgttagaaacggctttattctcaatcctcattgatgcttagcaaaaacaagcttaaatgttgccctgtccatctcctgtactgggcattcacttcgaaaagatgactccttggctttaagttgacagagtgtttattatccactaaaagcaataactaactagtccacaagtactaaatcctaaggcagatttaatcgaccctgctctgctaacagcacgttgcagtccttcatttgccgttttccacattattttgacttgacattgtctttctttctcagtgtatcatacatccaacaaggatagaggcccttttttgctcttctttataaccttacaactaggttaaatgcccgagacacaacagatacgtagtaaatgctattcactggtgagttcagtcaaagttctcaggctatttgtaacaggttggcacaatttaaggacccttttgtttccttagctcatctagataatgcagtgatgacttgctttatgttttctcattgctgcagaggcttgaaacatcctgagagattcaatgacatttgctattcaaacatttttgttccaattaatagcggtgcttctcaaggggaaatgcagcacaaatgactggtctcagaaacattccctttttgggataactgaagaagaaaatcaaaatatgccatggttttaatgaaaacagtctgcataactctcagtagaagtgggaaactgggaattatattgtgatatagagcgtgtcagacggaaagtgaccattgctctcagctactatcattggaataaatcaacagcacaattaatgaattgacctagttatctttttaactaacctgtaaggattccattagtttacagtgttattcttttaaaaatcaaaaaatgtatgcatgcgtcctttaaatttcctacctgttagcaataaagcgaaaataatttaagtaggttgatgcaaaagtaattgtggttttgtcactacttttaatggcaaaaactgcaattacttttgcaccaacacaacacattaaactcactaccatcttatagaaatttagctcattcacacagacatattatcagaacatatttgtgaggcactttaaatgtataaaatgccacttttgttttaatgatgtcaaccacctaagaaggcagtttgaagaagtattgctaattgtatttaatattagagtcagcagaatcacaaataatgttttgaattttaaaaagtagtaaagaatcaaaattggaaaaaacttttacttcaaaattgtccttttgtgagcaaaatagatttaattttaattaattaaagaaatctttatgttacctcctcctttcttttttcttctatcattgagcatctggttacttatttaactcagagttttagttcagggtatcaaggagtgtcatggaaacttctaaccctaatttctaatgataaccatgtgtgaagaaaggaagacattacccatgactaaaataaaaagctttaaggtgagaatcataaagagtatacatctcatggtttctcaagtgagtaaagtctaaaggggtttgcagcctgagatgaacctggagttcattgttagatatatgttttagagaaaaatcatccttcaacttcatagcacaacatcactcattcatcaattaaattaatcaatttattcacccatcaatattttcatggaagtgtctgctatcttccaggtgtcatgctaagttctggctatatgacggtaaacaaaaccatcgtgcctggctcacttttgtgggagatacagatttttagcaaatatacacacaattataaattttgaaattgtaataaatgttactgagaagagggggaacaacccttagattccctgtaaggaaacaaacagaaaaagcagggaagggaaagatatttaaacagaattgaatggcaagcacactaagacaattaaagaaaaagtctaagaagggtgaaggtgtggagcactgaggagctgctggatggtaggtagtgtatccaagactgccaagaggtaaatttgggagtggtgggagaagccaggtcacatagaaccctgaagaccaagtcagaggatcaattttattctaagagcattgaaaatcatgtagacagattgtaagctgaggaatgacatgttgtaagaacattatcatggatgctatgcggagacattggaagaatggaaatgaggaaacaaggatgcaaagctattgtaatactataggcaaaagatttttttttgactcaagttattctggaaccatgaaggtgagatgaactatacacagttttaaattactttggggtagaatgacacaaggtgagaggttgcatatggtacttgagaaaatatatttatatcaagcacgacttacaactttctacattgtatataaaggatatcttggcggggcacggtgggtcacgcctgtaatcctagcattttgggaatccgaggagggtggatcatctgaggtcagcggttagagaccagcctggccaacatagtgaaaccctgtttctactaaaaatacaaaaaaaaaaaaaaaattagctgggcatggtggtgcattcctgtaatcccagctactactcgggaggttgaggcaggagaatcacttgaacccaggagatagaagttgcagtgagccgagactccagcctgggcgacagggtgagactcctcaaaaaaaaaggcgggcggatatcatttactttgaatactttctgaattcctaggaaaattgttatggatggtagtagcaataattcaagtgaagacacatgctacaacatggatgatacaacaaggataagcattaaagacagcatgctaagtgaaataagtcagtcacaaaagaacagttggatgattcttcttacataaggtgtctagagtcagaaagtagtttggtggcagtcaggggctgtggcagcagggaattagtagttagtgttcaacggatacagtgtttcagttggggaacatgaaaaaagctctggagatggatagttgtaataattgaacaaaaatgtgaattacctataccactgaattttacatttaaaaatcatttcaatggtaaattttgtgttatagacattttaccacaataaaaaaaaaatagaaaaaaaatgttgaactcagcaagactgaaatttatctggatgaattcataaaaactaccatgcatatttaagaatatattccacatcaatttaatgtataaatttaatgtgtgtgaactaaaacacaatgtaagaaattttgccctcttcctgtggctgcattttgaattttatctggaaattttttgagaatgttttgcatgctctgtgtgtcaggttttaggtagtcttttgtccttgttaagatctggtactccactttccctcattttaaataactttcacttgactttcatttccatgccaataagttcattctagtaataaaattttattgtcactctttccaagtttttattttcaccgttttatgaatactatcaggagacaagaaagagctttacccttatataccaatgtgccactcaaatttattttctgaagttaatcaaaaagttttggagaatttattttcccctatgattatctaaatgtgtcaattcacataacatatagatattccaaaaattcagcaccacagaagaccacattaacaccattgtaatattttaattattggactgagtggatcttagtctttttaaatgaaaagaggattccaccctctctaccccttaccctggctcaatatctctcacataatagatgcaggaaaataatttactgatatggtagatatgtgccatctgcccatcggggatagtagaggtgtctggtgttacaaacagcagtaaagttcaagtttccaactcagaagtagcatctctgtggggtagtggtgattgcagaacagtcaaggtctttgtattttgtgctaggaggtagcaatgacaacttcaatagtgtttttattagaacacttttttcttttttgcattctttcacattttttttcctagaagcagagcctcaattctgtgtttccaggtttcataatgattctgtgcactatttaatacacttttaattaagtatgtctcggtttcaaccagtaaaaatcgattctgttctttagaataacctgactgataaaattgatagaaaccttcattcattcattcattcattcatccagttgtttatcaattgtaaatggcatttatcactctatcatttatccagtcacttagacaaacgtttatttagcatctactttttcccaaggtctgacttgggtaaagagtaataaaagagctaaaatatatatgtctccttcaaaaatatttacacctactcaaggggcctgctatgtaagtggacaatcacagtaatagtgtggtgagaattacaaataaatactcagagagcaatatatgaaataaagagggacaaccttgccaagcttgagtgatcaaggaagacttctcagaaacaacagtgtttctcaaagtgtgatttatagatcatttgcattagagtcacctgctggggtttaaacatcccaagttgattgcctttatctatatccactgaatcaaaatatttgactttttacccaggaatccatatgtggaacaaagattctagaaatataagtaagttgggaaagaatctggaagatgctttttcaaagtcctggaagtaagagagaacagtcgaatgtttaatatcccaagaacaaaggagccagagggacagatacagtaacttcaagtatgtctggcttagcatattttgacgtttatgtgaactatcaaagtttggggtcaaagagatgtggatttgtatcttccactaagtacactggccgtggtgcttcagttttgcttgctatagtttttccatcttgacaggaagaagagtgacagcaactcatagggagatagtgagaattaaattcacttaattgtataaagacactcactctcaacaaaggttagtttcatcatattcatatgtatttttgccaaaaagagttgtttgttagcttggttaaatatcatgccaaagaagtgtttatggtcattcactttatgcagtgtacagagagcagctgtgcagatggaaacttaataaatggctttttaacaacagtcatgatagtggtttgtaccttcttaagttctgtttaatgttattgagtttgtattacattctgctaaagaaacatgggcctttgaaaagcatatgggaaagtatttgttgatgatatgaaaattggctctgattctgcttgcaaataatagcaaatgaaagatagatatatttggccaaatgtcaaaccaaatatttttaaatgtattgggaatatcttaacagatgtttcccaatgtttaatattgttttggtgaagtttagtttaatattgtatttggtgaaaataatattggcataatattttcattcagagctaaactacttttttttaaagaatgtaaaaccatatccctcccatctgattatgacccttttgttattgatttgagtaaaagaggactagaacaattatgcttgaaatcactcttcattgaggctttccatttttggtgtttcatgctgctcttgttttcttgatttcccatgaaatcagatattattttctaattatggaagcacaataacagctgagctacagcaagctcttcttgctctggcttttgtaaacaaggtattgatgatttcagcagatgtccctgatttgagatcttttgcttctttctaggcaggggatgctcaaaccatagacacaaatctgcttttccaggaataacgtgctagcaacatggtcagcaaccccaagatttttagctattactcccgaaaacctcatctgctcagtaactacactagccatctgttcccctaaaattgttttcatttcttctaacattcagttgttacttaatactaatctatttcaatgttttatggtatttactgctctgcataacaactgtacttgttcactaacatttgttatccgttttacatcatgaacatatatgtcttcttattgtatttttttttctttttttagttgggagtggaattgctgtttttattatccgcggtcctctgactatatattcctcaccatgtcgtgcaaagccttctacaatttgatgttaaccggcccttttacaggctgagtatcccttctgtagaaatgttggaggtccagaaatgtttcagatttcagatgtttttaaatttcataatattttcatatatataatgagatatttgggggatgggacccaagtctaaacaggaaattcattttgtttcatataccttatataacatagcctaagggtaatttcatactctctatatgtatataatacatatatataattacatatatgtattaaatacattgtatataatacatatgtatataatacatgtatatgtattatatacatatatagagagagacagagtctcactctttcccccaggctggaatgcagtggtgcaatctcagctcactgcaacctctacctcccaggttcaagtgattctcctgcctcagcctccagattagctgggaatagaggcacatgccaccatgcccggctaattttttgtatttttagtacagatggggtttcaccatgttggccaggctggtctcaaactcctggcctcaagtgatccacccacctcggactcccaaaatgctggaattacaggtgtgagccaccgcacccggcctcatacaatatttttaatacttttttggcatgaagcaaagttttgactgcattttggctgtgagccatcacatgaagtcaggtatggaattttccacttgtggcttcatgttgatgctgaaaaaatttcagattttggagtatttcagatttcaaaattttgaattagaaatgctcaactcgtaccacatattacatcctttacaaacctctcattccatcggaagtaggttctttctaaagatgcctgtaatttttccatctttatgcctttgcttattctgtttttccctcatgcacttttttctcacagttctacaagtttcaactttaaaacaattataaatggtatcttctgtccatggatatttagaagatattagctgggataatctgcactattaacactccagctgccaggcttccagacagggacttcccagtcttcctaatcacttgaggcaataccttacaataagtatcttcatatgtattctacatagttctgtttttctctgcgtaagcctgtctaacacattcgtaacctcattgtggtttaattgcatttccctgaatacctgtgacatttgctaaatatcagaagaatggataaattgtattcatacagtagaataaaatagcttaattaagacaaagaaactacacctatgttatcaacatgagtgagtcttaaataataaaattgttattaaaaaacatgtgtggaatatttatcatctcttactacatatatagtaagataccatctatataaaaatctaaaaatagactaatcaagcttatgttggcttattgatgcatttataaatagtgctggcactcagaaactgatatcccaaaatatgaaactttgaatgacgaactaaagaagaagccacatggtctctctgacctttccctcatcttgtctctcaatcttctgtctctcccaaaccagagaatgaagttattctctgacatctccttatctgcctaaaatctggacccaccaaagaagaaaacagttacctctgctcccttcctgaatcttcattcacaggaagagtaaagtctgtcaacacactgggacagacttttgtcattgtatattctccaagcccacagaattcccctaaaaatcatttactactccccctaaaattattcacactttcccaaatccctttcccctaagaagcgtacataagcacctgtcccctgttggtttggagttaatcactctgtgattttcctccatgcacattaataaaaatttgcatgccatttcgcctattaatccgccttttgtcagtcaattttcaacaaactttcaaaggtttctcttcacctttacaatcgcaaaggtgattacttctgggaacagtggatagagactgacgctgtgtagggatacacaagactttatttgattctggaatagtttatattacagatgggttcacagtgttttattttctcaacagttttctagctcagaaatactttaatgattaaaaacaaacaaaaaaagggattgcatatagatgattctattttattctctttatttgttttcttacaataatttttttaaaataagaagtaagaactgtgcctaactccttttcactgctacattcctagtctaagccatcacagtcatttgtcactattactgcagttggatgctaaatggtctccctctttctatcctccccttaaatggtctattttattttgaaaattaccatcaattcttcaaatatttaagtcagatcatatcccttttctgcactaaaacttacaatcaatttctatttcatcagagcagcaaataaacaataagctccatacaatggccataagacctcctgccaattatctgtctttatcttctactaatctactgatcacaaatgcaggagaatatcttagaactcttgttctagatatccattttgcttggaacactttttccaaagatatgtgcttagctagtccctcacctccttcaggtttttttctcatatctgactttctcacagggatctacctaaaccaccaaatttagtgctatagcaggtactccagtgacaccatcatgctgctgatctttccttattacactctattttttccattttcagtagcttgcgcatttaaacgtgccacataatgtaattatttgtaggtgtactggttattgtgcatctcctccactagaacatatgctccccaaggcaagaaatctttatttggttcagcaacgatctcaagtagctagactaggtggcactcaataaatatttgtgaaatgaatacatcaatacataattgataaaagagaaagttttcatattttagctcatacttgttttgggaaatttctcatggagcacaaaagtcggcagagtaagtggcattaaatacagtcatgcatcaatgaatgacaggatacactttgataaacacattgttagatgatttcatcattgggtaaagatcatagagtgtccttacacaagcttagaaggtagtctatatatagtctactataaatactacgtatatagtctatatgtagtatatatgtatatactatataaatagacttatatagtctactacataccaaggctatatggtttatcccattgctctcagttgacgaatctttacattacaacatgttcttatactgaatattggagacaattgtaacatagtgataagtgtttgtgaattgaaaaaccgctaaacatagcaaaaatacagcaacaaagatagtataaaaaatttttaaaaagtggtatacttgcatggggcatttaccatcagtggagctttcagaactggaaattgttctagtaagtcattgagtgagtggtgagtgaatgtgaaggtctaggacattactgtgcaataccatagaccttgtaaacaacgtacacttaagttacactaaatttcaaaagaataaagtaattgcactatgatgttatgatagctacaatgacattgggtgatagaaatttttcagtttccttaaaatttcatggggccaccatagtatatatggtctagggtagacggtaaagtcattatgtggcccttgagtatactttctctctctctgtgaatatgtgtacatttacaacttcatatagctaaatttgcccaaagtcatatgtgcataatggtgcaaatccactgagaattttctaggcactgtactaaagatctaaggtataaggattctgaaattgcataaaatagctccctgctctaggggagcacagttattttattcttaattcctatttacatgtctttggctaaagtaagccatgtgatcctgcctaatttcaagatacagaagtgcaataccaccatattgcacaaggagatccagaaatatttgtaacagcaataatgatgacctgattggtcatatataattccaggcattcttttctactccatagcctccttgaaaatctcttcaataaatagcatagaaaagaaaaatgtcaagttatgagtgtcttgtgttatctcactttgaacattgaatatacttgttcaccattgagaacttcacccttatttctaaacatcaatgcccctcaaaaacatcaaagcattgagtactctggaaattactttttgatatgattacaactaggagaatatctatcccatggtttccattcctgacatccttttgggattacttggagcacttattaaacatagacctttggtatcactttagaagattaagactgagtagatctgaggtgaatatcataaaaatattaaaataggcatcccatccaacagggttctaatatagctatgtggggactatggcttgtatgaaaaaaaaaaagcatttgtaaaatgcttctgtagtgaatgacagtgactgttcacaggacaatttctgctcttggggactacagcctgtcttgggctcaacctgctgcctctgaattcacttgatgcattttggatatttgtcccctccaaatctcaccttgaaatgtaatcagcaatgttagaggtggagcttattgggaggtattggattatggtggtggatccttaatgaatggtttagcactgtcctcttagtgatgagtgtgtctttgctcagctagcacctgcaagatctggttgtttaaaggagtctgggacctccccacctcccacccccttactcttgctctcaccatgtcatgggctggctccctgtcgcgtgctaccatgattctaagcttcctgagccctcaccagaaacatatgccagcatcatgcttcctgtaaagccagcagaaccataagccaattaaacctatttttaaaatggattacccagcttcaggtgtttatttattacgacacaagaatggactaacacatttgctttgtttctgcagcggccctctaaatctcagttgtttaccatctacctttgatagcttctattgcccaattctcagtattcttttaggcttctgacttccagctgctgcttgctgctattaaaggaagcaatttccatactgacttagagtatttctgctcaacattatggataagtggaaaataagaaattttgacataataaaaattaaaacctaagacattttacaaagttgtttaaaaaagtcaaagtcattttttttgtgatctttcattgctgatctatatcctaaagaaataacgtggaacctcttcaaaatttcacccccaaatttttattcaccatgaagagattcacaaacttctactaccacatcccactttccacagcaaaactggaaagaatcacacgtgcttgacaataggtatctcttccttgatcactgtccctttatgaagatatattttagtttgcatctatttcccattagttacctatgtcacatcctaacccattgtcatacaagacagtagtgaaatttctagaattctacattctagtacaaatttagtgttttacactttagaaaccatgaaagtactacagtgaatatgaatgagtcttttcaaaaattaaaatacagaaaaaggagaagatatttgaaaaagtaacaaatttctgtagttatttttaaatactatttcctcactatttctcacttttagcttctgtagaacaagcaaaacataagtaaaaccaaatttccagatcacggagttctttctgaagcatgggatgtgggctgtaagcttaaacacattccctgagttccatggcctttgtttccacatttcaccagcagtcacattctgttccagaagctcagtagattcaggcttgggagaggaacttgagtaaaggggagggaagttactgaggagagatgagtcagagctgattcatagatccatcagtcaattacagttcgtatcagagagtaggctccttaatattatatacagtactgaactgtgattaagatggatattccggtttttcaaaatttatatttagttggtatttctaacagaaagtgattcaaacatgtacatataatgtatgcttgtgcaataccattaggaaacctaaaaagagtattaataataaagttataaaatcacatctgacatttatcaaaatttttctgagagaaattacatggtttgaaatggaaaagaaaatgagaagggagattatgaggaaaaggattcttccttgattttcctccaaagagatgatgaaaacaaagaatgaatggtcatggctcacgaaaattaactttacagcagaaaccatcatttatacttgcccccaaggctgttctgtaggttaaacccatttttttttaagattttctttaacaaactattcttaatcattttgccacaattgtggaaatgactaatttttctgtcttaagtggaaaaactatcagcactattacctgactacattttaaaacttaacagcttttatgaatcagagaagtgaacaactggtacttccctgaattaatattatagttttacatttttttaaaaaactctctcacagttgccagcttcattactgaaaatcaatgagttttcatttttttataggaatggtttatctataaactataaaactacccagataaaaagaattttttttgtccttacagagatcttagtgtttttgtatcttggccaaaactggactagatgctgtcaactagagcaaaattatatctgaatgactggcaacttttgtagacacagctgtagtgtattaggatagtagaatttattacttaatccccatattttgttcccatcataattataaatatatttggaaaaaggtaattttcataaatataattaggcattttgtccttggtttaatcagaatttgctttattttggagcacaaatgctgcacttactagagccagcaaatatgtagcattacctaaataaaacccctttgccttataaagcttgcagagccctcctatcattaatgtgattaaaagttgccagagggctcatggaaatgcaaaatcctaggtcccaccattagaattccgtcaacagtaggctgaagaagagactgggcatctgcactttgaacaaatgccccaagcattttgagaattgcatttaaagaaaaagattttgaaacccagaaatctgaaacaaaatctatttttcaaaacctgaaggagcaactctttcatcacttgaaagctatgtcaacattttgcatgcccaacaaatttgttactggaagcttttgaataattttagttgaaatttaatattacttggtacttgcaaatgcaaagatttgatatcatagacttgtcaaaaactaattgttaagtagtatgtatgtaaatacaatattgaaacacattggaaataggcattttaaaaatgagatttttttcccaagcattttaaaaaataattttttgaagtaaaactcatgtaacataacatcagccattttaaagtgaacaactgaatggcagttagtacattgtgcaatgctgtgcaacaaccacctctacctagttccaaaacacttccatccataaagtaaaatcccatactcattaagcagtttcttcctattctcccctctccctttgttcctggaaaccaccaactcatattatgtcaaaaatgagatgtttaaaatagaagagtctttttcatatgttcaatgactgttcttactacaaatttttgtacaatataaaacttgactttcagaacaggatcaatacttgttttccacttggaagtattttaataaaaaaaatacattcccagtgtgtaaacttgggagtaaatcatattgtgaagtatttatttagatagtaaaatctcattgtttctttatttccaaatgtaggggttggttatgatgaaataggacaatttattcttcagtttttatttatgttctaattttccgtgctcatagtcccatcacaagtggccacataagccagtatgatctccttcctctatgctcaaagagatgtaatgatagaagggaggaaacaaagtagcagaagtgtcatattttagaaatctatcagatacagtcgtttgctcccctaatatctattgtcttctcctccctactcccacttcctccatctccctactttaatagtaaatatatgctcttttgcacctctgcatcaccatgaaaataggatgaactaaccttctggttccaggagaaagacgagggacttggaaactgaattgtcccatccactgcagctgaaatctgccaccttaacttcctgcagagcttcaatgagaagcagagatcagccaagggcctctgagcacctattcaactcacagatgtgtgaatgatgataccgaattgctgctttaaacccctcagctttgtggtagttacatgggaatagctaatacaaataagtggtgcagaccccggacacagagctgatacacaggatgtcactgggagaaacagagaaagagtgtggttgtctccccatatctacagtttcacattctgggatttcagttacctgcatttaacggaggttgtctgaaaatattaaataaaaaattcccaaagtaaacaattcgtaagttttagaatgcatgccattctgagtatcataactaaacctcatgctattttactttgtccttctcaggatgtggtttcaggtatccggtgagggtctcagaatttatcccctgtggataagggaggactactgtaatcagaaaagcagaaagagatgggttaactgttagcttaagcaattatggaaataaaatttagaaaataaacaataccagttcccaaacatttatccaaaagtcttaggactatatgtgcttgaactatagaaattttcatactttataaagttattagaatgcatacacactatatgttttaacagtcaccagcaggttctgggacaatgcctcaatacatcattctggagaaaaataaatgaatattcacataaagcaaaataaacagagactataaaattcatgtcatctcaagttaggtttggcttctaaatgagttgggaaaactattttagattttagtgctttctgaatttcagaactacaggtgaagaacctgtaatgtcaacaatgcagaaaattataagtataaaaataggagtataaaaaataggagagtcattgacttggatgttaaagcaaattccttgttggagtagttaaggtaaaaaaaaaaaaatccacaaatctatgaagtaggtatgttcagtgaatacttcaagctcttaaataaatagttaaggaagattatacaaacaccctcctccgataggcagttgtcctaaggaattaccccttgccttcagttcctattgttggtatcatcattattttttaaaaattagatggaaaaaaataatttactaatttacctctgtacataataagaaaggtctgctgagcctcagccgagtgtaatgtagagagtagcagggggatgtgaagggccagtttgagtaatcccactcctaactcaattgtgtggctattgtctctgagtggcttttcactgtgtgttttaaaatagactctagttcatgaaagacacaaaaatgtcattatttccataaatgtaactaaaactggcagaaaatataaaattctgtggaaaccacaggctcaaaatgaagactcttgttccagcccaattcaaatatatctgataaatgaatagtatgctacaggcttaactcacatcttctctagttatttgtacgccaatgacaagaatggttcagaacaagttactgggtcatactgcatggtctctatagtcatattttaaaaattctatacatttaattctaatcatattataaaacacattatcattactagtattattatcactaatattaggatcttaacattaaaattctgtaaaactactttggaatggtattaaattggatagcatattatcttagaaatgttaaactgaaataagtagtatttttcaagtaaataaattcatgtggaaaattatgccccatttgatgttattcatttatttctttaataaatatgtatttgttgactagatgaatgaatgaacaatatgtttttaaccatttactcatattgcatatctctcaaataagactgtttcctttgttatttaagcaagccacatgtatttgaatgctaatgtatttctgttcttaatttgcagtattgttctttaatattcttgttgatataaattgaactgaatggtcatatcatcaaatatttatggattaaaaaatttttcatagaagccaatagaacaattttagtctgtattttgtgtttgttaagtttgtttttatcaaggttgtatggacccttaaaactctattatatttagatgcttgcttggcttaaatgtaatgttttacaaaaattcatttctgcatatagtgttttacaaataattgcctcttcaaatgtgcgcctatattagaatccaaaataattgtgatataaggtataattctcatattaaggcattcaaaaatacattttatattaaagtgttaatattgtatattatctcttataaggttagtcttccatattatcattttccccaatgatattaatacatgaaaaggctctctagtgtgtcttttttttctaaaagcttgagaatattattgcgatttccttaaaatataaaggacgttaatcatttagctatgttgcattatgaatgtcattatttcagagaggtggatatattctaggagtctgttgaaaatgaatctagtttagaagaacatgaaacataataaaagatacttctcaccatgttgtaaagagtaagaacagatttgaggtttgtaggaaatcagttatatggaaaattaatcattcaagatataaagaacagaataaaaatgctaatttttgaaattcaaagatagacttcagaatagagagaatacaataaaaggtagcaattataaacaaaagaaatacaaactctttaagccttatctagctctggagcttgccaaaagtacaaaacaggaattaggaaaaaaaaattaattgtcgacatctacagataacataatctttttaaaagaaattgaaaagtttatcttaaaaggaaaaaaattttatttttaatatgagttttgttttcagatgtatactttctttaaagatgtaaaatgaacttttgcttgagagcagaacttatctaagagacagaaaaacgagattttgtattttattatattgtatctgattataaccaatcaactgaaactcgtaaagcaccattcaattttaacaagtgatccagaataccagcctcttagtggacagaaacagaggcgacttcctgatcaatcagcaaagagaacaccagagagttaaacttcattctgactcctgcttctgaggcaaaagtagctctaatgctgttcctattttagcaactccatggagagcccccacagttcatttgaagtggtcgaaaattctttcctttgaagaattcttaccttcagaaccacttttatgtggatcagggcctgtgaaggaaaggtcaagaaagctctgacctgtgacttatttgtactgctaaactgtaattattaaaaagataaaagtatgattctatgaatatggaattaacatgtgttaagcgttttaactcattaattaatgtaggaactagtaagatgttaaaacaagttcaaagaagaagttgaagaacattgtatagttcgtgtgtgtatacacacaccaaatcaagaaatctaaaatgaatttgctaagagatagaaaatatttcatagtttatagggaaatgaaatgcaacagttggggtcatattttctaagagcagaaatccattttaccttccctagaaaaaaatcattttgttgctatgaataagaataatttcaattttcatcaaattttacaattcaacctctaccgctacagggtttttaaatatccttgtgaatataaaaaaaatcaaaagtgaaaaacacataaaatctgataatccttcaaggtctactagacactgtcttgaatctcagtgaaagaaaacccagtaagcttgtttgcccatttacatgtcttggaaaatttatcccaagagcctttggttgtgtctaaagctaaagttttcttgatctgaaaattccagttgggctaattcatgtttttttttaattcctcaaatccatttgttaacaaattgtgacaatattctagagtttccctccaagtatatttcaatgcacaaaagcaggaaatcagttgtccaaataataggtttaaaagtttacatctcaaatgattacaaaataattaaaaatgtaaacctatcctttggcttaaacttaaatgacaatttaatttcaaggaagataaacttccaaaaagttataaaagttttagtaataatcttccatgatactacacattctcaaatatagaaccggaatttggaaaatgcaaattttatcaacctccactctcaacacttcagtggaatcagaattgcttgaataactcaaaaggacacaggcagcccatcataatacacataaaacactagctagaattaataaaagaaaaaccatacacttcaaacacctgttgttgaggcaaggtttcactctgttgcccaagctggaatgcacaggtgctatcatagctcaatgcagccttcacttcctgggtttaagcaatcctcccacctcagcttctcaagtagctgggactacaggcgcccaccaccacacctggctagttttttaattttttgtagagatgagatctccttacattgcccaggctgatcttgaattcctgggctcaagccatctgcccacctcagcctcccaaagtgctgagataacaggtgtgagacactgcacccagcctaactcagcatttttgactgcataccttgcttggcacaagttgcactttgataaatatttggcaaaataaagacacgagggttctaagagggtaaaaagttgtaaagtgaatatcttttactcctatggcgttcataaataacagttgttttatggaaatgatagaaagttattttcagccctgtgtctcctgaattggaagcataaagattcttagagatacgaagtacatatttaccattaaaaataggcatattacatcaagagtggcaaagtgaaggtaacagaatggtgtaaggagcaccaagtggttcagttgtataaacagaaagtgaaggcgaaggcaaaaaataaaaaatacaatgaatatcattttcaaagaaaagacaaaggatcagtagaacaaatagaatagttaccatctcaaaatgaagtctagtttacatcagtctatgtctgagacctttcataacctctataacgtctgagaattctgtattctattaaatttccaagttcatgtgtatgcacagtctgtttatttagttgtaatgatgcacaatataattctttgcttctagagcaaaatagacatgaataggtttgatctctgttttcagtggtcctttagttgaataagaaacatggtggggcatcaggtagaggaatattgagagttccagagaggagggggagaggagagagagtcagcaacctggggttgaaataaaagctggaatttaagaacagaaacacacagcagttctatgtggcatcgataagttatacacattatacctaagcttataacctcaggcaagtctgatgagggaaacgagcaagagtgtctaaactagagccctttgggtcataggtttaagtaataagaatcgtaaacatgttcacaatattacaaaattgtgctactgacaagtttatggtttcaagccccagttgaataaatcttattgttttaatctttttcttctattgtgtcctaacttctgtgaggtgatttcaaatcacttaaaagtacctacaaactttcttcactcttgctcacccacggaagataaacttgaggactaattcaataggaaataaaaactctgagctataatatagctcaaattcaaccaccctgccataactagctgctaaaatgtccaaactcttctgcacttacaagttccaggagaaatggcagaaacttaatttctagaaagcaatttagttgaaaacaaattgataaaaacagcaagttgatcataacagagtacttacaatatgtgggctttcatgtaatagtaccttttaatcaacagagaatatttattttaatgagtcagaaactttgaaaacatttttaatatattcaaatgtagcatttaaaatttttaaatgtactttagtcaaatatgacaatattttaattacattataaattctactttcatttcagtgacttttccaaaacaagtttattaaaataaatgctctaaccattaaaacttgtttaaataaaatttgagcaacctagcgtaacacaagattttaaaatattagtacattcttaataattattatctttttaatttcatgtaattgtatgggaccaatagtttgcatttggccatgtttgttctcttatattaaaagcttttcacatttcttcaattagcatactttgcttctatctgatacaattaatacttgcaattagattaataatgtaatttctatttttaagaaaatgtgttcaaaatttggaaataagcaaaagattaaaagattccaggtttataaatggaataatatttctacattgaacttacaagaagtcttgtagtaagttaaattttggtgtttgaaaatttaatgaatattaatttatgaggctaaagggtaatgtgtgaatactattttctgcattgaaaactacactcaggagcattaaaaacaaattaaaaatcatgttgatactctcccacacctgtttttccctaaaaggatatagtaggaaatgttgaatttctttcagcaaatataactgatatctatacactgaattcagaattattaatggcttttttctggttattaatcaagctacaagaatgactcctgctatcctatgagggagcactgatatttcaggagaaaaattgtgctgggaatacttttttattgtgatgaaatatatgcaacataaaacttactgtgttaaccgtgaagtggacaatttagctgcattaagggcatttacatcattgtgcagctatcaccaccaaacatctccagaacttttctactatcccaaactaagccctgtagccattaaacaaaaattctgattccctcctatccataaactctggtaaccactctgttactttctgtctctttgaaattgactattcttagtacctcataaaaatgaaatcatgcgatacttatcattttatatctagcttatttcacttagcataatgttttcaagtttgatccacattgtttcatgtacctgaatttcattcctttttaaggctaaataataatcccactgtacggatatgccacattttttttccattcatccattggttgacattttatttctgctttatgcctatggtgaaaatgctgctatgaatattggtgtacaaatatcgtggaagcaaaggtgagtaaatatgtcaggatgtttcttaccattttaaaggttgctttttcttgattaagcatttgcttggcagctatagagctgtaattgttttctggaactctttaaaggttagtccagctagttcctggtttctttttcttaaatgtttctgcaaagaaatgaaggcttgaagctgcttagtcagccattttgctctgcaagaggaatttttatgcagcattgtctgaataatttttgacctaaaaacggaaagttgtgatattgtatatggaaaataatgtaccttgcattttatgaataagttaagtgtttaatgatattcacatttcatacatataatttagcaggttgtttatataccagagaaattttcagtatgttcaaataatgccatacattttgttgtacaggcactgtgtaatgacaggtggggtaggtactattatcactgtatcaaataaaaaataatttaggcatggagacaaaacattatctgcataattctaaaatgatggagttaggaagacttattgtgtgatttttctttgtcagcacattttatagcagccttctctaattgcttgtgtgtgttttcatttacacactcaaaagtttagtcaaaacatttctggaaattatcatgaaagcacgcaaaggatatggtcaaggacaataatcatttaggacataatcttcttggtcttcataggcccataataaattatggaagcagaaatattggttgtaggtagttgctttcatctacttaaatttaagcactataaattccccaaatctctgttcaattttagctaaaagtcagctctcaggtttagatcaggatctgactcacaggaaactgaaataatgggttagctttggtcttgggataaaaggtagatcaggatgaggcaagacatgattagacgaaacctaatcaataaaaacttcaattaaacaacactggcttatcatatttatttttcacttctcaatataaatatgaataaatgtgccttaacgtacaataatatatttttatttttagtatctaaagatttaaataaatcatctatctcataagggccaaaccctttgattttgttatatgctcatttaattgatgtcccttggcgtatgaagcactctttactttggttcgccttctttcttcctacaccttctcacaatctattgctgactcttcttcttacaaactagaatttgttgatattcttccagctatctttgttagtcttctcaactatcttttcatgatctgcctgataatctatctaatctcatagtttcaaacatgatcttcactctgaaatttatagtctttcctgagatttaaaactgtagttgttcattcacttattcacattatatactcaattaaaaattattcacaaagcatcctcttccacagcatctctatagtgtttctaatttgatttccacaagaagcccaaattctcattctctgtacttccggtgcactcccctttcagttttccctatctctgttaccagcatcttcatgagttactcatcctaaaattgtaagtttttctcttttctgctcagtgtaaattgaatcaatgttgatagatccagtctccatttcagggaatgtcgttcatcattgtcctcactagtgaaaaggaaaaagaaagaatgtatttgctctatagaaatgatttacttaccataaattaattaaatcactaagccacaaacaagctgaatcatgaggtgttaccaaaaatgtgtaaaatttgagttcaaaatttatacttgaataattagaaattgtctaaaagtttcattaggcatttcaaatatcttagatcttagagcctttatgtggaagttcatttagaacatgttaggataactaaataccaaccaataaacaaaaaagctatccaaggcaatgtgtttgaacttctggaaccaatctttaaatgattcttcctaaagtcccattatattgttttcaaatggcattggagagtgaataaagggaacaataagattttacaagactgaaagcatttacgaaaccatgtaactgccaaagaatggatgttaaagcatcctaaagagtctgattaatgaataatttaaaaagtcatcgtagctaactactccatgttatacgacctttaccccttgggcatctgataaagagaaaggttcagctttaaacaaccttagttgaattagaaatttacttgcttatcctaaagccatccattttatgacccagttgattacgtttatttttctctccttagatttcttcatgtcttttcatacagaatgaatcatatgatgataataggcagctgagaaaggagtaacagagaaggattctttaataacccacacatgcctgtggtaaaagcaactgggtcttttaagctgtgtgtatgattcctaaatgtcaaaacttctttgtggctgtgcctttgttctgttattctctatgtttagatgatactttccttttttatgtctaaattctacttatctttcaacacttaactcatcagtcaccaacattgtggaagctaacctgatttatcctttttataactaataatgtaatacttcaataaatgctcttccataatgccttgactagaatactatgacatgtataatattaatgtgcattacaactggttacataccattatatgaacttaatatcagcaggtctgtgtctccttggaaatagaaaaatgacttgaatataacaattgcattaaaatgttggcttaattgaatttcatgttccacaaaattaatttactgctcagagcaactggcctaggaatctaaaattttcatgattgcaactcagcttagttctaaccatattttgatgttagcccaagcaagtattattttatgtaattaaaaaaagttaagattattaaacatatgttttctacttatttcataaaactgcatattcatatagaatttctatctccttatgaacactgcacaaattataaaaacatgtaaaataaatgtataaaaactacttatgccaaaacaaaggaaacctttcttacgccccttacaccctttgtggatattaaccacattcagaatattcttgtgatcatttctccagctggacacctactgaaacagaaatgactttagcttaattaaagtccctattggtgcaatggccttcaaactacagggtgatccttgtggaaaaagcaatggccatcctactcattgcagtggctgggggtttaatcctggaagggttatctactgttcaccctatttttaacaagaaatcacctccattgggctacaactctcttttatacctctggaggttggaaatgtggatatttattgcagttaaggaactaagaattttaaagaggtaacttgccaaagctggctgaaaaatgccctcattctccttcaagtttattgtccacacggcgctgtgttgacattccaagaaggataatgtggttcaagtctttcagcacaggtttcagggatatagctctcaacaaggaattgcgcttgaatagctgattttatttacttactaaagagtatctcttttataatttaacaagtagaaaaatagttttaaatactcagataattacaagttaaagcatcaaaacatagactttctccgtggtcagggtgggtgggtttcatgagcttgcatcctatgcaatcacaatggcctcatgcttagaagaaccctgtgaatggtcttaggttatgctatcactgtcgtgaaattcttgctaacttttggacaaagggttcctacattttcttttggtgctgcctttgcttactggtttagaattaatcaagaggttttggctgctgaaagtggcaagtacaaagcacttaggtaaagtgaataaatctccaattttctgaattagcagcttataggctatgtcccagaaaattgtattgcaaacttttgtttcagcagaactccaccacatttttattttcttctagtgaaatgttatgcagaagcccaacctttgaagccagtaaaagtgaagctgatgtggttcgagtgcagttgtgaggagagaaaggtccaaggttctctcggcatagagttgaggagggtggttggggacagtgagttaacattaaagaaccttaatatgaggcaaaacacagtgtgaaagcaataatgatcaacaaagggtattggaataattgtagggaagtgtaggcttattaatattcagaatcaaagcactttatctaaaggactaacgaaacacctgaattgaacagggcttaaaaaagatactattcttgggtgcttgatataaaaggatacagaaaagtcttttcagaggcttacaatatagtgagtgttagaactgtaaatctcacgtaacttttgtctttccatctgaatgtacagtagaacagattgtaaagtgcacaattatatgatatacaaactctaaaacattgtcatggtagttttgaatttcttgaggaaatatgacatatacctgaatatcagctttcagactattgctctgaccttttgcccagttgtttaaaattttctcattagaactgggtgtataatacaggtctgtttccctttattggaattagaaatagctcagacacaatgccattaacaggagatcaacaggctattccatcaagaatggacttagaatattggtaaacattgctcagaatccaaattgagctgtagactcagtatcttattatgtaagtgcaaggtgtgaattttatgtgctgaagccatgtcaagcactattaaactgacaagggtataaagaagaaacaatacagacctcttggaaactctcattatcaacaggcgattagaggtgtgtagtttcaacagagagagacggaggaattcttgaatgctgttcaacaatcaatattctaagtctacatgttttttaggaaaacacaaaacagtgattcttttttaatatgctcatcagcttggttatcaaagtcatatttcaacattgcctgtgctcattaaatttgtacttgaatataaatgtttgaatatacatttttatgtggaaaaaagtcttgaaatgaatctaaagtggtttcaaggacacatttcacagttcataatttaccaactaaagatatgacattttgatggtccctcaaatctgtttctcaggacacccattgcgcttttaaagtggtgttgtgtcttaatgcctcagtcacacctgagatgactggctgggtttcttgagtgatagaaatgataacaattacaccagtttccctaaaagccaacttcagtaactttgatggccctgatatttttgtctgtgggagcaattactgaccagctaaatgctgctgtccacaaaaaaattgtaaattgtgtcctatagaagtatttagaaaatactatttgaaccaatgtgacagttaaggttctcatcttgctctgagaaatattggaccttattttatcctttgacagtaagctatcttactgtcaaggttagtccagcaatatagtctactgttcaatatttatttttccttattttatcttatttttaaatcttacttatttttttttgagacggagtttcactctgtcacccaggctggggtgcagtggtgggatctcagcttactataacctgcgcctcccgggttcaagtgattctcctgcctcagactcccgagtagctgagattacatgagtgaaccatgatgcctggctaatttttgtatttttagtagagatggggtttcaccatgttggccatgctagtctccaactccttacctcaagtgatcccccgcctcggccacccaaagtgctagaattgagccaccgcccccggtctattttttcttattttaaatagataaatatttggaataaaaaagataagtgtccaactgaaggataaaataatccagtagcagaggcttgaataccagaaaattaaatgacaaaaaaggctatctctagacatattcaaagtcaaattcaaagccagagtgaaggtcacccagaggctgcgtttggtatcagagctgatgtttgtttaggtgaagtttgtttaggtgaatctctctttcatattgcaatagttttaaatagagtcttccttgtctgtttaaatctgtccagtacaatttttcttagactattgataactaagtgttgcttggcatgttaaaaaggaggccttaggtatgctgccgtggggaggtgctgggcaaagagtgataggttaatgctgctggtggtgagatttaaccacttgttagctttgttcactatgcatgcaccacacatatcactaatggtgatcctggcaagaacaagaatacaagtggatttctaccaaaacatctcccattaattttcatgcaactactaacaacattcctttattaaaaagtataaaatccaggttcaatgctggagaaaagtataaatcagaagtgctccaggaaaactacctagagtagaaaagaaatcttggggatgagtaattgtctgttacctcccaaatcttgtagtgtggcccactggcacgaaactcaattatcatcaaaaatgtgataaaaaaaggtcactagaaatcaacaaccatactgtcctaaatcaggtaccaattagttctacaaatttagtgcattttttgtgttggagtggatggtgattgatgacaaggcgtaaaggtcgaaggggctacctttgatatgtattagttgttttctagaacatcataacagaaacacgttttcatttctctttggcggtttctatctctgtgtccatgttggaaaagagaatagaagagaaaaaaggagagaagacagctaccatattttatagttctttctcagctttcattggaaagcttactggcaagtcaagagcatagaaatacgaaatgaaaaaataataatgagtaaaacatgtattagagaataattaagtatgatctatctgtttaaaaataatttaagacatctttataaaatgcatagttcttacttcatggatcaaagaaaggcaatggaatgtttccactctctcccattactttcaatctgttgttgcatacatgtcatgcatcattattaggtatgtgaagctcttccttctttaagttactttatatcaaatatcggcttgattattaacattttaaaaatctgtttcatacaatcggtgaatagttgagagttgcagtcttatttcctaagtatttgcaaatatattacatataaaactccaggaattggtttagtggcgttttataggcaattttatcctgttcctggagtgcaactataaggtgtgctgagctattcctactaggcaagacagtagtttccaacattgccagaaagctctgagcagcagtcagttttatatgcctatgtgtgtatggaggaactggagaagcctttgggtatatatacactttaaggaatcttgaactctgaagcctgccagtctacaactgggttaaaattctgcatcagccacttaccagcttcatgactttagacaaattaaaaagttacttaacagtaagaactctcatttattgcaggcaataatgcaaaatagtatagccactttggaagacattttagcagttccttacaaaactaaacttactcttgccacacaacccagcaatcacactacttgatatttacctaaatcaattaaaaacttatagccacagaaaaaaatctgctcagagatgtttatagcagtttcattcataattgccaactatttgaatccaccaagatgtccttcagtaggtgaatgtataaattcactgtggtacattcagaaattgggatatgattcaatgctgaaaagaaatgagctattaagccatgaaaagatacagaggaatcttaaatacatattactaagtgaaaaaagccaatctgaaaaagctctatactgtatgattccaactatatgacactctggaaaaggccaaactgtggagacaataaaaagattaatggttgccaagggtttgggggagggaaggattgaaaatgcagaacacagaggatgtttagggcagtgaaactatattctgtatgatagatactgcagtggtggacacatgccattacacatttgtccaaacccatacaatgtgcaacaccgagcaagagtgaaccttcatgtaaatgatggataatgggtgataataacatgttaatttaagttcatcaattgcaacaaatataccccggtggtgggaagtgttgatagtgggggaagatgtggctgtgtcgagacaggggatatatgggaactttctgtactttctgctcaattttgctgtgaatctgaaacctctttaaagtttacaaatttcaaagcaaaatgacttaacctccgtaggcttcagtttcatcaaatttaaattgtaggtagtaatagtatctatttcataaagtagttttaagaccaaatcagtttgaagacatcatttgtatacagcagtgcttatcactttactcacatattagcagttatcagaaagaggttataattgagatttacagttattaaagcctttttcatttctatgatcttgattgccaccaaacacccatgattaacctgtaaggtagactgaatggaaatccttaggccctctttatattgggaaacaaagggtcagcattcaaatgaattatgtaggatcataagtcagaattggaaataggtcttgtgattcctagagcaatcatttttccattacgcacatttgtctaaagacactcttatacacttaaaattgtaggcaaccctcaccttgcacagtaccctgttaggagaaacccattaatgtcagatccatgcaaggcaaggaataagtatattgaagaacccaaagaacttctgtgtacctggtttatatctttggatgttcactgtattacacatttatattaatatatgtaaaactcaaatagataagcacacagtccattagtcctcaaaatgatgacatcttcatgctatgaatctctggaagaaacccactgtattcctttgagagaataagatttaaaaagacaaataacatcttgatattattataaatttatgcccaaaaaaagtcaaattaaggatggtacgtttgatctcttggatgatagggaagggacttggaatacccaggggtccccagtcaacactttgagaatgactacaatatattatatgccatgagaccacctttatacaggttgccctctaccccgtctttctaatctgctgcctaacagtctccctgcccttttgcagtagcttttccacattctcccagtcattttttagcttgatcattaatttcacactagacagattctgagtccctgtcctcttcaggtccattgagacttttcctgcaggcatattctcctccagaattaaatgggatgaaaataggccatagaatgtcagagctttctgcctgtaccaaactctcagctcagttcatgcggagccgagccagggatgagaagcagcagctcagttctcagctggagcagagccagagaaccttgagctgtgagctggcttcagaagccacagccatggccccggacaagcaggagaatgaggtgtggctgctttggatgtgaccaagtgaatgaaagtcacagaggactgcgccaggcagggcagggtccgagccagatgagattgatccagatgactcatgaataatcaacaatatggagaagcagtggtggctacttaatgcagtttatataatgtaatttcctttgtttttagagcatcatgaatgtcgatgaaatgccctttcatttcacatttaagctctaaaatgtcaccacaatttccagtttattagatgatgtgtttctttaaaacatttggttttacaaataccatgctctattgttgcataaggtcagaattattttctgcctgtttatatgcagctttaccaactaaatcaatttttggtttttaggagcatggaaccacagttaataggttagaatttgttgtacataacatttcttcgtaacagatccttacactgaatatgtgatgtttactgaaacatctcatcatagcctttcatgcacaagatggcataagatatgctgattgattactaaacatccttccctataattctgcattatccacaaatgtttattgaacccttctttggcatagataactgaactggtagctacatataaaaagtaactataaaacgtagcctcccataaagacttagggtctagatgagaaaacacatatgcattcataaacatacatgagcaaacacaatgcatccacagtaatataagctaaatgttaaatgtcaaataacgtaaaccggatatatagaagggtagaggagggatctaatgatggaagtttgtcttttgtcagctcagttttcctttggtaatgcacttcatcattcttcataccattgtgataaaataagattaaaatgaacctcaaaaaccagtagggtgtttacatgactcctgtctggttaatcagcatattcttcccctagccacactgcctcaagttggaccagtgaataatctgctttttgatttaccagaacaatgtggaaggaactatttctatgggggttataggctggtaggaggaaatcatgaaagttctcctggtcatatttgtctctcagttacaaaaaccttctgaaaacaaagtcaagactgaaaaaagcaggattaagaggtatagaaggaaggattcctggatctagcaatacttggaatctcttccactcctggtcttttccaaggatgtgagctgataaagcccttttatttgtaagctgttttaattaggtttatagcaccagtaactgtaagggtcctaattcacacagaggcaatgataacttaaggactgccattctcaaaacttcttcaaagaatgttttgagcagagccctgagtgctgtttaaaactgttaaaagaaaaacttctactggcagctttcatgtgctggcattgagtgtctctggcttttccaggtacagagtgtaagctgttggtggatctaccattctaggttctgaaggacagtggccctcttctcacagtttcactagacagtgccccagtgtggactctgcatgggggtacagaccccacacttcccttctgcattgccctagcagagattctccatgaggattccacccctgcaggaaacttctgcctggatatccaggtgttaccgtacatcctctgaaatctagtaggaggttcccaaagctcaattcttgacttatgtgcacccgcaggcccaacaacttgtgtaagctgccaaagtcttggggcttgcaccctctgaagcaatgcctgagctgcatgttggccccttttagccatggctgggatgcagggcagggcacaaagttctgaggctgcataaagcgcaaggccgtaggcccactacacaaaaccaatttttcctccaggtctctgggcctgtgatgggagaagctgctgtgaagatgtctgacgtgtcctggagacattttccccattgtcttggtgattaacacttggctcctcgttacttatgcatatttctggagcaggctttaatttttcatcagaaaatgagtttttctttcctatcacatcaacaagctgcaaacattccaaactttaatgctccgcttcccttttaagtataagttccaattccaaactatctctttttggatgcataaaactgaatgcttttaagagcaccgaggtcatctcctgaatgctttgctgcttagaaatttcttctgcccaatattatatatcatctctctcaagttcaaagttctgcagatctctagggcaaaggcaaaatgctgccagtctctttgctaaagcataacaagagtgaatcttattccagttcccaacaagctctccatctccatctgagatcacttcagcctggatttcattgtccatatcactatcggcattttggtgaaaggcattgaacaagtctctaggaagttccagaatttcccagatcttcctgtcttctttgagccctccaaactgttctaaactctgcctgttatccagttccaatgttgcttccacattttcaggtatcttatagcagtgttccagtacattgtgttagtccattctcgtattgctttgagaaaatacccaagactgggtaagtggtgaaggaaaaagctttaattgactcacagttcagcatggctgggaagcctcaggaaacttacaatcaaggcagaaggggaaatggaagcaagacaccttcttcacaaggtggcagaaaggacaatgaatgcaggaggaactaccaaacattataaaaccatcagattttgtgagaactcactcactgtcacaagaacagcatggggataactgcctccatgatttaattatctccaccttgtatctcccttggcacatgggagttatggggattaaaattcaagatgaaatttagggtgaggacacagccaaaccatatacccttataagcaattgctcaaatttccctttcagcatttcttgtgttttaaaaaatattatcttagtgaaagtaacacatttaagtacatgaaaagtatgttactaaagcttatgtgaaactagctttcttctgcctgttctatttttgcttctctccaccaacactttcagtactagagaaaaatattttcaagtctttcagctcttctttcatatattagctctatgttttcaaataatatgtttatactgttcctttttaagttttcaacttcaaatatatatagtcttcttgtcaaattagttgacaatattaaccacctacttccattttgcctcaaatagaattttgatttttggtcaaattatgaattagtatttgcttgagctgtgtaaatattgagactatgttaatacttccaccaatgagtcacatagaactaaaaagaggtgaggctataattatgattcattttttagttaaataggttttgcccatcttctgcatcaaaactgtcaaattgtttttggaaatactatttcccaaatgctcaaatgtgtctgatagccttcaatttccatttttcttcttgactcttctggcgccacctcccctgattccgtttgcattctcaacttcaagctgccagttttcattcttatgttcaagttacctggcaccatacgtgctgaaccttcctggtatttgatggggcttgtttgctcatagatgatttcttctttaactctgccatgtcagctactgtatctctgttggattaaaaaaaaatgttgaaatctcattggggtttgtacagttgaccccagagcaacatggcttgaattgcacagcttcacttatataacgattttttacaaaatatgtttcaccgcgtgtgcctacctctcctgcttccacttgcatctcctccacctcttccagctctgccatccttgagaaggcaaacccaacctattctttctcctattcctcagtctacttactcaatgtgaggacaataaagaggatgaagacttttaaaacaatcgcttccacatcatgaatagtcaatgtattttctgtttcttatgatttttgtcatacattttatgttctccggcttactttattgtaagaatacagcatattataaatttaacatacaaaatgtgttaataactatttattttataggtaaatcttccagtgaataataggctattagtagttaagtttgttgggattcaaatgttttatagggaatttcgactacacagagtatctgcacccctacccttcacattgttaaagggtcagctgcacctattaatttacatttttctttagcttattttctttattttaattttgaataggagacaaaataattgcatgttgttcatctacctagattttctggaaagttttctattcgttttaatttctgtggttcctgtcatagtatatttgaatttcatatttcatattccctttggatttttggttaaaataactttttaatttaacatttatttatttatttagtgagttgaagtttcactcttgttgcccaggctggagtgcaatggcaccatctcggctcgctgcaacctctgcttcccaggttcaaacgattctcctgcctcagcctcccaagtagctgggattacaggcatgcgccatcatgcatggctaattttgtatttttagtagagatggggtttctccatgttggtcaggctggtcttgaatcccggcctcaggtgagccgcctgcctgggactcccaaagtgctgagattacaggtataaaccactgtgaccagcctttaattttatttttaattgacatataatattgtacatatttattgagtacatggtaatgtttcatccatataatgtaataatgtatagtgatctgatcactgtaattagcacattcataatctcaaacatttatcatttatttgtgttgggaacattcagtatcctcctcctagctctttgaaactaaatattattgttaactattgtcatcctacagcactacagaacactaaaatttatttctcctacctagctgtaacttgcattgtttaataaatctcttcctatccccttcctcctaccctccccagtctagtattctctgttctactttttacttctgtgagatcaacttcttttagcttccacatgtgagtgggaacattgcagtgtttaactttctgttcttggcttatttaacttaacagtgtcctctagttagattcatgttgccacaacttatagaatttcattttttctcatgactgcccggtagtattccattgtgaatatgtaacacatcttctttatccatttatctgttattggacaccttggctaatttcatatcttggccatgtgaatagtgtaataaacatatggatgcagatgtctctttgatgtactgaggtttttttaatttggataaatctatagtagtgtgattactggatcatatggtagtcctatttgtagttttgtggagaacctctatactgttctccgtagtgactgtactactgtacattcccaccaaccatgtagaaaagttgctttttctccacatattcaccagcattttttattttttgtctttgtgataatagccatcctaactggactgagatgatacctcattgtggggttcatctgcatttcccagatgattagtgaggttgttgagcattttaaaatatacttgatggacatttttgtgtcttcttttgaaaaacgtctgttcaaatcacttgtcaatttttatttggaatgcttttttttgctactgagatgtttgagttccatatatattctggatattaatcttctgttggatgaatagtttgctaatattttctttcattatgtagcttttcttctcactctattgattgtttcctttgctgtacagaagctttttagtttaatgtaatcacatttgtatatatatttttttgttgcctgtgcttttgaggtctgattcataaaatattttccaaggccagtatcctgaagtgtttcctttttgttttcttctagtaggtttgtagttctgggtcttatattgagatctttgatctatttggggttgatttctttatagtgggagaggtggaaggtctagttacagattttttttttttgcatttgaatttccagtttacccagtaccatttattaaagagattgtcctttctccaatgagtgttcttggcaactttgtcaacaatcagttggaatttgatacacagattaatttccatgttctctactctgtttaattggtctatatgtctattttcatgccagtatcatgctgatttggttactacaactttgtagtatattctaagtctggtattgtgatgcctctggctttgttctttttgttcaggattgcttatgtgtacatagtgtatttgattatttcacacaattttaaaagtttaattttacaaaagttaagattttttctatttctgtggagtatattgatagggcttgcattgaagaagtaggttgctttatatattattattattttaacaatactaattcttccaaaacatgagcatgagatatctttccatttgtttgcatcctcttcaatttcttccatcagtatcttcttgcttttattgtagaggtcttttgcctccttagttaaatttaatcctaagtcttttaacttctttgtggtcttataaatggcattgccttcttatttcttttccattcactttgcccttcatgcttagaaacactagtatttatcaatatataacattttatcaatatacaatatttgtatattgattttgtatactacaactttactgattttatttatctgaagagtttttcgtagcatctttagatttttctaaaaagattgtattgtctgcaagagggacaatttgaattccttttgtttaatttggatgccctttctttctttttcttgcctaattgctctgtctaggtcttctaatgccatgctgaataagattggtgagagtgggcatccttgtcttattctggttcttagaaaaaaagctttaggatttttctcactcggtaagatgttacctgaggttttatctcatatggcttttattatgttgagatgcttttcttttacatataactattgagaattttaacatgaaaaggttgggcgtggtggctcaagtctgtaattctagcactttgggaggccgaggaaggtagatcacctgaggtcaggagttcaagactagcctggccaacatggtgaaaccccgtctctactaaaaatacaaaaaaaaaaaaattatccgggtgtgtggtgtgtgcctgtaatctcagctccccgggagggtgaggcaggagaatcgctggaacctgggagatggaggctgcagtaagtcgagatcacgccattgcactccatcctgggcaacagagcaagacactgtccccttgcccaaaaaaatgaagagttgttgaattttatcaaagatcttctccatttattgatatgatcatgttttttccttcattctgttgatgtgatgtataatatttattgatttgtgtatgctgaaccatcattttattcctgaaataaatgccacttgaccatttttctaatgtacattggattcagtttgttagtattttgttaaggatttttgagtctatgttttttagggattttggcctgtagttatgtttgttgtgtctttatctggttttggtatcagggttaagctagccttatagaaagagttaggaagaattccctcctgttcaattttttgaaagaatttgagaagaatttgtagtaattcatcattagatattttgtagaattcagcagtgaagccatttggttctgaacttttctttgttgggagaatttttattagtgataatctttgaatttattttaaatattcttttttttaagtcactttttggtgttgagtggtgttgagtgttgtttccaaacggactcacttttcccccttaaaatcttcctttgcattctcaagagtcttagcattttgtaaatgttttattaaagcatacaaagaactcagaaattatttttaggcccctaagtttctgctcacagattttagtgacatccctgacttgcttcatagtcacatataagaatatataaatcactttaaaactgattttagaatattgcctatgctttaagaagcttcttaaaatcagtggtctacaaatatacacaggtgtcttgttaagttaatcagcatttgttcttgagaaacagtcacccaggaggctgtgagatattgtaactttggtggttggaaatttagaacaggaaaactttaggaataataagtttaaaatcattttgtattcaccctggtgctccaacttcaccgaatagatccattgtcaatcagttagagatggcagcccagattccataaaatacatattgattttacccatagacttaccctggtctgggaatgcaagtttcagattaatgcttccatactttttctctaaattcccttttaaatggtatttgtccctcacaagaagaaaacaaaatcaaaacaaaaaaaccctcatcaccaatttaactattaaaaaatggttacagatgtgttgtttatttttagttgttaactatggtctttcatgtctgtatttaatgacagagctctgattaatttactctcaacaagtatgcgtcttatgtgttttttttttctattttgaggtctttcaagtgctcttgacaataacataaattctatctgcccatgtacattggagctctattatcatggactgtgagtgtaaaaagagaagcagtagatcctcattatatgcggattcagtatttgcaaatttgtcaatttcctaaaattatttgcagcccccaaattgatacttccagagctttgatgatcattcacaaaaatgcccagaacagcaaaaaacttgagccgtccaaattacacattttcagctaaggtcaaatgtaccactctctcactgaatacatttttgtattgaattttgtgcatgttttttgtgcatgttttcttcattttttgtgctttctgtttttgattttgctgtttaaaaatgttccctaagtataatgctgaagtgctgtctagggtacgtaggtgcaagaagactacaatgtgatagagaaaataatgtgtaacatgagtttccttcaggcatgtgttgtagtgctgttggtcttgcagtcaatgttaatgaattagcaagatatattaaataagacccctttaaatataaacacacataacacaaggtgatgtaaaagtttgatgaaaatattgtgagcagaatcttgcagcaacctaactctgtattttccttaggagcaatgattctgtatttgctataccagtgttgacagtataaaacataaccactgtgaataataagaatagattgtatttaaatattacctttgtggatgcctattctattataatttggaaatcttgtggtggaagctattgtggtttttgttttgttttgagacagggtcttactttgtcacccagttgggagtgcagttgcacagtctcggctcactgtatcctccacctcctaggctcaagtgttcctcctgccttcccagtcccccaagtagcagaaaccacaggtgtgcgccaccatgcctggttaatttttgtagtttttgtagagaatgggtctcaccatgttgcccaggctgttcttgaactcctgacctcaagccatctgccctcctcggcctcccaaagtgctagattacaggcataagccactgcacctggtgtgtgtttttttttttttttcgccatttcaaatcaaagttggattaatgggttgccctcatctaatttttattgttattctaagataaatattaactaagttgattgtcttattttcatttctatttgctcacttttataagccataaaaagagaaaaagaccaagttttatgttaaaatgaatctgttttgttcttatttacagaattgtgtatatacttttaaaatcatcccattaaattgctttaaaactgtttctcctgggttttttagtaattataattatagcaatatctgaacccttaaatcccaaatagtatgttgtttacctgcttcagtaaggatttctgagttacttcgctggtaaaatcaattgaaacatttctttttcttgaaaaattctgtcatcttttttttaagtgatatagaaagaaatattgaccttcgcttttaaaatacaagattatcaaccaactataatcctttacaaaactaagtgcgtttcactatcatgccatatgcaataatcaaatgataatttcagttaaaataaaacaagctataactgaatatttcaaattattatcccaagctttgactttattttattttctcactaagaattacagcttcagcaaaatatactacagactagtacatggataataagttagtgatttagatagttacttggattttttaaatatttaactctatgtatttgtatacattcaaatcagagtctcttttttgttgttgtttaatgttaatgcaaatgagttttgccaactataggcctttgagaactaaccttgtagttccattgtaggtccattatcaataattaaggtccattatcaataattaagataagattgaccttttcttgcctttcatatttctattttggtgcaaaaatgactcttctcccattacaaaaaaaatctttgcagttgctgaagcagaacaattactttatttccacttcagagaaatttcttttttggaggttgaaacacctgctatgcatacattatgtaaagaacataccaatcatttagaatgaaagtttgaatataaatgtcagacattactgaaaactgtttcataatgtgcttatgcatcaatttcattgttttactcttttattgctatagaagcaggcagatatacgagtgtgtgtatacatatatttgtatacatatgtgtgtgtattgtgtgtatgtaggtgtgtaattaatagacaagtataacaactagtaattaacaaataaataacatcaattatttacctgttttaacatcacctggccacagttccacctaaatgatggcaacatgtttccaatctgtggctttctgctacgttttatttgccttggaatatttgcatttactcatcaatgctacaaacttacttacatattgtaggggcatgcagatgtattccatgagcttcaattaataaatgattgggactaaaaaggaaaaagtaaagaaattgaaatttgacctactgcccaaagcttgctaattgcttattttatttcagttttaatcttcaggtcctgagcaaattatccatcataaccagctgatatggtttggctgtgccctcactgaaatctcaaattgagttatatctgtcagaattcccaagtgttgtgggagcgacctgggggaggtaattgagtcaggggggctggtctttaccgtgctatcatcatgatagtaaataagtctcaagagatctgatgggtttaacagaggtttctgcttttgcttctttcatatttttctcttgccaccaccatgtaagaagtgcctttcacctcccaccatgattttgaggcctccccaggcaagcaaaactgtaaggacaattaaaactctttttgtttccagtttcaggtatgtctttatcagcagcatgaaaatgaactaatacagttaattggtaccaggagtggtgtgatgctgaaaagacacctgaaaatgtgcaagaggctttggaactgggtaacaggcaaaggttctaacagtttggagggctcagaagaagacaggaaaatgtgggaaagtttggaacctcctagagacttgttgaatgcctttgaccaaaatactgatggtgatatgaacaataaggtccaggctaaggtggtctcatatggagatgaggaacttgttaggaactggagcaaagatgactcttgttatgtttttagcaaagagactggcagcattttgatcctgccccagagatttgtggaactttaaatttgagagagatgatttagggtatctggtggaagaaatttctaagcagcaaagcattcaagaggtgacttgcgtgctgttgaaggtattcagttttaaaagggaaaaagagcataaaagttcagaaaatttgtagcctaacaatgcagtagaaaggaaaaactcgtttttttgagtggaaattcaagctggctacagaaatttgcataaggaactaggacccaaatgttaatccccaagacagtgggaaaaatgtctccaacccatgtcagagatattcatggcagcctctcccatcacaggcccaaaggcccaggaagacaaagtggttttgtgggcctggcccacagttcttgtgctgtgtacagcctagggacctggtgccctgtgtaccagctgctccagccgtggatgaaaggggccaaagtagacctcatgctgtggcctcagggggtggaagccccaagccttggcagcttccacatggtgttgagcctgtgggtgcacagaaatcaagaactgaagtttgggaacatccacatagatttcagaagttgtatggaaacacctggatgtccaggcagaagtttgctgcaggacagggtgctcatgagaacctctgctaggacagtgcagaaggaaaatgtggggtgggagccaacacagagatcctactagggcactgcctagtggatttgtgagaagaggaccactgtcctccagtccccagaatggtagatccaccaatagcttgcactgtgtgcctggaaaagctgcagacactcaacgccagcccatgaaagcagccaggaggagagctgtactctgcaaagccacaggggtggagctgcccgagactatggaaacccacctcttgcatcagcgtgacctggatgtgagatctggagtcaaaggagatcatgttggaactttaaaatttgactgcgccactgcgtttcagacttgcatgggccctgtaactcctttgttttggccattttttcctatttggaatggctgtatttacccaatacccgtatccccattgtctctaggaagtaactagtttgtttttgattttacaggctcataggtggaagagacttgcctcatctccaatgagactttggtctctgaacttttgggttaatgctgaaacgagttaagactttgggagactgttgggaaggcatgattggttgtgaaatgtcaggacatgagatttggaggggccagggatggaatgatatggtttggctgtgcccccagtgaaatctaacttgcattgtatcccccatatttcccacatgctgtgggatggacccagggggacgtaattgaatcatgggggctggtctttcccgtgccattctcatgatagtaaataagtctcatgagatctaacgggtttatcaggggtttccgcttttggttcttccttatttttctcttgctgccatcatataagaagtgccttttgtctcccaccatgattctgaggcctccccagccatgtggaactgtaagtccaattaaaactctttttgttcccagtttcaggtacgtctttatcagcagcatgaaaactagtacaccagctgtatataattggaacttatatatgccttgttctttctcaacttctttatctaatcatttttcagagtcaaccacctgagaaggtatatatacttactacttttttttaacaatctgtttcagtctggattacattctcatctctctgtagaatgtagtgtcacaattgttaactaacattggagatcaggtcccagatttgatcctcattaaagtccttcttgaaacagtattttcactttgcttttctgatagcacattctcctggttttcatcctgtttcttgatcttctctcatcctgccttatccatctctacctagacatcaaatattcatgttgcctgaagcttggaactttagtctggttaaatttgccatattttcaaagtaatttttctgtattaacttctttctttctttctctactcttatgactcccagcactgacttatttttgaatatccacactcatttgttccaatgttcatttcacatctccacattttttccagaggcaccttgaattaaacctatccaaaagtgaatccatgaaactttatcaacagtctttcaaagccaatgttaccaatgactttacaatgataaaattcagaaaagctgcagttctcccagtgtcctcttccgtgctctatttaattcattaccaaaccctatttattttactcattaaatatcattagaatatgttaattgttttctgtatgtttcagtctctcctggttcatgttagtatcacttcctgcctagactactgcagtggtttactaactggtttctctaaacctacttttgcttccttcctttaaattaattttccacacctacatatgtagttaatattataaaatgtgatgtcaaagatattggaaagtcaattaagtatgtaaagtttaatgttgttatcagatctatgctagaaaaatatttggtagcagtgaagcatttgagtgaaagaaagattctcgctttaggagagttgagctgatcttaagaggctcatgtagtaaatggtaacaggaatgagaaggagagttatctaagtattaatcttctgcattgtgcttggtggttaataggatatggtgaagagtgagatgccaggccatgtgggcaagtacaaaaagcagtagctgccctttgctaaaaaattattcatgatattcctaattagatttaatgcactgttctttacagctctctaagaaaattataacactctctttgtcacctattagccattatatatttatgtgggcacatgggtatatatgcatgcacacatgagggtatatatgtgtataaacctatacatcaggttatgacagtatgagtgtgacttcttctattggtcttcctcagtgatctactgctttctaggaatatattgcatctggaaacgtatttcacagatgaatcagccaataatttctgagcacatcaaatatcattatctagaaatcattttctttgactataaacttttatacctaacaaaagtttattaatttatttatgatgatagctgaagttatagactatatgtcagaatttatgagtttaatattttctgggcttaaaaattgccaagtaagtcatctttcatgtgttatatggcctaaattagcactctgaatagccccatctgttaaaaaaaaagtgttcaaatatctaacaataatgaaagaaaagagaacagttgtgacttagtaactcagttaagcagaagactgaaaatcacatacattttgatcatctgttatttttctttttatatggttatcatttgtaatatttgaaatttgttaaagtctatatgaatactttctaaatatataccattcatcaacaaggtgagtaataaatgtaagctatttaatttacatacctaatttactggcatttgtctttggaaaacaattttgtataaaaaattactttgaaatgtaacaagtatttcataggcatttaataaaatttcttcattttaataattattttgaatatccttgagagaaatttaagaaaaagaataaatacatttttcttcttatttaacttgtgtagttccactagattttttactccaaaacttttttctatgttgtccgtatttaatagagatatatgtaatctacagtaatcatatgggaaaatattcatatttataaggatgtatatatttagtgtaaaattatttagaaaataaatattttctactgtaccaaggtacaaatgtattgagcataatatttatgcagtttaagtttttcttaaacatataaaaaattattgtagcaaaatggaagggtaaccaaatttgactttcagtataaccaattttatatcactgttaagtagaacgacatttgttcaattaaaatggattgagtctggattctctaagagaaagaaccaatagaaatatatatatttgtgtgtttttatatgtgtgtggagagagagagagagaatgttattataagaaattggttcacatgatgatggaggctgagaattctcaagatcttcagttgttgagctggaggcctaagagagccagcaatatcattccagtccaagtccaaaggtctaagaatcaggagagctgatggtgtaagttccagtctaagtctgaatccaaaggcaagaaaagactgatgtctaagctcaaagacaggcagagagagagaatgatcttattttacccttttattctattcatgccttcaaaagattggataatactcaactgtatcggggaggtccatctgttttaatcagtccatacatgaacatgctcatctttgctggcaatatcctcacagaagcactcagaaataatggttaataagttatacacagtcaaactgacacataacagtaaccagcaactcatgagcacactttttaaaaaatgtccttgtctcagaaattgacaaagatcaaggcataaaataataatggttaagagcacaccccatgatggcggactccttggatttgaatctcaactcctccacttgtataataggtcaatgatcacagaaaattccattatccattcaaaatgttaacgtatttatctctaagagatcattataactctgtcacagagctatattaagtctcagtgatataatcatggaatttttaaaaataggtagcctattataagtgtgaatgaaaattttaaccctttaaacattttgctgaatgatataatggaaataagtatattgagtcaactgaattctactttacaatagggaagtggaaactttcagttttataatttttatttacagtagggtatggaggtttactaatcatcaaatttacctaggcaaatccaagccaccaaaatcaacatttaatctgactgcttaatttatataagtgtgtataaattatggacacaaatacacttttaagcagacatctaccattttattgtaagttttgatagtttcattgagtttaatacttagcacaacatggatattgacattttaagatgaaggtcttacatcatatctgtaaatatttccaatggaatcaaaacacaataattatgtaatatccagaattatctgctttcaaaaaaaaattaacagtgtttggtttaacagtcagaaattttatctttttctcctcaaaccaatttcactcaactatcactatttaataatcattataatgcatatatatttaaaaataaatattttcttgatataatttattatttgtgaccataagcatctgtaaataaaaaaaatcaagagtaagttattcttctagtaattattagtccctgttataaatgatgtaaacttatcatgttttcataaacaactttaacaaattaaagtgatttttgaaaacacagctctctatgagaacgtaatttatattaatgattaatttattattacaatgggacagagtttaccatacattctattcttactattttttaggtcattgacatggtctggctgtgcgctcactcaaatctaatcttgaattgtaactcccacaattctcatgtgtcatgggaggaacccagtaggaggtggttgaattatggggcaggtctttcctgcactgttctcatgataatgaatgagtctcacgagatctgatggttttaaaaatgggaatttccctatacaagctctcttctcttgtctgccaccatgtcagatggaccttttaccttctgtcataattgtgatgtctccctagccatgtggaactgtaagtccagtaaacctctttatttttaaattgcacagtttcaagtgtgtctttatcagtggcatgaaaatggactaatacagtaaattggtaccagtagggtggggcactgatgaaacgatacctgaaattgtggaagccactttggaactgggtaacaagcagaggttggaacagtttggagggctcagaagaagacaggaaaatgttggaaagtttggaacctcctagagactggttgaatgcctttgaccaatatgctaatagaaatatgggcaataaagtctaggctgaggtggtcacagataaaaatgaggaactttttaggaactggagcaaaggtgactcttgttatgttgtagcaaatagactggcagcattttgcctctgccctagagatttgtggaactttgaacttgagagagatgatttagggtttctggtggaataaatttccaagcagtaaagcactcaagaggtgacttgggtgctgttgaagctattcagttttaaaagggaagcacagcataaaagtttagaaaatatgcagccagacaatgcgttagaaaagaaaatcccatttcctaaggagaaattcaagccagctgcagaaatttgcctaagtaactaggagccaaatgttaatcccaaagacaacagggaaaatgtctccaaagcatttcaaagctcttcacaagcccctcccatcacaggcctggaggtctaggaggaaaaagtggttatgtgggtcgggcccagggtcccagtgctatgcgcaggacttggtgccctacatcccagctactccagccatggctgaaaggggtacacctagagcttgggctatggtttcagaggattcaagccccaagccttggcagcttctatatggtgttgaccctgctggtacacagaagtgacgaattggggtttgggaacctccgcctacatttcagaggatgtatggaaacgagtggatgcccaggcagaagtttgcttcaggggcagggctctcatatacaacctctgctagggcagcatggaagggaaatgtgggtttggagtccccacagagagtccctactggggcactacctagtggagctgtgagaagagggacatcattctacagaacccagaattgtagattcactgacagcttgcactgtgagcctggaaaagccacagacactcaacacaagcccatggaaacagccaggagcgaggctgcctaagaccacaggaagcaatcttttgcatcagcatgactgagatgtaagacattgagtcaaaatatcattttggagcttcaagatttgactgctctgctggatttcagacttacatggggttgtagcccctttgttttggccaatttctcccatttggaatggctgtatttacccagtgcctgtacccacattgtatctaggatgtaactaacttgcttttgattttacatgcttataggcagaagggacttgacttgtctcagaagagaccttgtactgtagacttttgagttaatgctgaaatgagttaagactatggaggactattgggaaggcatgattggtttttgaaatatgaggacatgagatttagaagaggccagtggtggaataatatggtttggctgtgcccccaagcaaatctcatcttgaattgtacttcccacatgtcatgggaggaacctggtgagaggtgattgaattatgggggcgggtctttcctgcactgttctcttgatagtgaatgagtctcgccagatctgatggttttaaaaatcagagtttccctacacaagttctcttctcttgtctaccaccatgtgagatgtgcctttcaacttccgccatgtttgtgaggtttcctcagccacatagaactgtaagtctgataaacttctttcttttgtaaattgtccagtctcgggcatgtctgtaacagcaatatgaaaatgaactaatacactcatctttatagatgtaggtattgaaataacttgtccacataaacaaatagatgaggataagtgtgctattctagcaatgacattgaattctttcaactcttttcaggtgtttgtaaatgtctcattctaattcttcagcaaatattatttttaagtggcctatcaacaaacaatccaagtaggtaaattctttagttttgttgaaaactgatagttggaatcatttgattttcaaatgtatttattttttatcctgtcattaaaattctttattttttcaaaatcattataaaaacattttgattggtctcagtagtgatgcctaggatctttgtaattttctggggcaatcaccctgctagtttagtgctgggcaacagatattttactttgaaaaattgggagaggtttattataacatggcagaaaattagaacttgggctgggcatggtggctcacgcctgtgatcccagcactttgggaggctgaggaagggcagatcacgagatcaggagatcgagaccatcctggctaacatggtgaaaccccgtctttactaaaaaatacaaaaaaaattagccaggcgtggtggcgggtgcctgtagtcccagctacttgagaggctgaggcaggagaatggcatgaacctgggaggcggagcttgcagtgagccgagatcatgccactgcactccagcctgggcgacagagcaacactccatctcaaaagaaaaaaaaaagaaaattagaacttgaagctccatcaaatggccttaggaaatatttaacataaaagatgaaattatttaaattagaaattaattcccttaaattatctgtgctcacacccttgaatgcctccaggtacttcactgagcacccaaaatcgaagtagtagactaatgatctaaccaccaacaatacattggctgggcaaacaacttcacaaagcttttgttggctgagcatttcagatttctatttctagggtctttcctaaataaaaattctagggactgactaaggaaactaaagaataaaaagtctttaaaaacaggtgatatataatattttgtaaatctattctaaaattcattagggttgttctttaccaaggctggatattctcttgggacatagtctcttttgtgtacagaacagtttcttattttaatttcctccataatttaaatcttgatgaatttatttcattagcacattaaatctgcatagcacttacattgcccatctctcttaacacaaactaaagtaaaaaatatcctctgttgtttgagatttcatttgggtagattgggttctgactgattgcctgctcttcattacctcatcacaagttgcattgattaagattaaagcagctacgcttacatcttttcaacatcttatttaaaacttatttcaaacttttgttcattttagaaattgtgtattatatatactgggaaatcgtttccaaaaattatttccacctacaatgtattcacaagctcttaattttcaccttgcctagtctaatgcctttcaatctaaagcaatttgtaaataacttgatctttaccttcaaatgatagttgcaggagctgataaaagcaaagatcaatgggccatctcctaaagaaaggggtagttttcctgtcccaagatcttccctgcccccagagccagattagatctctattcaaatgggtggccatcaaaagtgataagtagtaaacaaaataccacaggtccaagacctctcatacaaataaaactcatagtcccttgttgatttgaggaaccaggttatgatgttttgcatacacattgtgttttaaatatctcaagtgtatagatctaaggaggtttgtattattattattgtaattgaaaaagaaaaacttaaagcaaccatattatacttatcttaaattcatggcatatgtgtcataaaattcaaataatcttatcacattataaagaaaacacccatattggtgataatttgaacaactgaattttccatttttctgtgaattgttgaataattagtaataagcaggttttacccacaacttagtatgtactgagcactgggtaagattcttacctacattataacattaataagtgtaagtccatgaggcatgcattttaaacagataaatctgggattgacaacactgacccacatggctctaagatctgttcaaaacacctacctctctgaaaataataaatcatttattctctttagactgattaatattcttaagaaagataactagaaagagggacaagtaaaatggcagaagtaattaaaatgaacatgaccatgtttttgttgccatagtttttgatggaaataatagttttttcctcagttgccaacttggtttccaagtttcagaggtcataagacgtctggggaacacattttttcattacaaattcaatgtgatgtgattcaatatgatgttacatttgtgaaagtttaaatcagcccttaagagaagaaaaacaaaaatgaattatcttcaaaaagtcataacagagagtgaatgattgtatttattatttgaaaacaccactcacctaccaccaaatatttactgatttgaagcagggctttttgatatttttctcgaagattcatccttttggttgggtaagggattggggaagtttctcttatattcaagaaggcataatcttacctgggtgggttgaagttgatggttcagtagaattatgatagcttcaacattggatttctatatgcatatgagaggagctctaatcataggaaagaggttctttttacaagatttaacataatgccttagcttgttttcctttactataacagaataccacagactgggtaatttataaagaaaggaaatttattttttacagttctgggggagactgagaagtccaggaacatgggaccagcatctggtgagagaaaggtgcaagttatcacatgaaaagagggcaaaggcatgagtgtgaaagtggcaaaatatgaagaatgtcgttgctttataataacctactgtcgcagtaactaattcagtactgtgacagcagcattaatccctcttaattacctaatcatctcttaaagatactgcctcccaaatcaccacatgaggaaccaaatttccaacacataaattctgggggacacacacaaatcacagcatatagttactgtgtttgtcatgaaaagactaacagatacagacactgcagaaattcattaactctgaatatacaaccagaaaagcatatgacagaagccattcctcatcaaaagcacctatcctcatttagttcttcaattaggacagtcagtcagacaatcagtatttgatgagtatcatgtatggcaaaatataagcaaagcctctctcctcttaaatatataaattaaagaagagactttatgaaaacgatctttttacacacagctattatattgttcttcaaaatcattaaaatgaaactctctgtgtaataatattgtatataaataatgagataagagtttctagtaaaagatacctagcctttccttcccaaagcaccttgctctgtttgttatctcattccagagatgagaataaaatgttaacagctgataataaaatgttaacagctgcttcattgtgagtttcttatgtcaaagatcaggttatatgcaaatttatttcagggacacaaacacggtagagactgccaaggtctaggataacattgtatttatgtgtaattcaagaccacatacacagcacgactctgtaattgatttctgaataaatcattatcccattagttttattggtaactgaaaattgtcatttatcaaatgaagatttagtagaaaagaaaaataaattatactgaaaagttaccccattgtccaagatatatttaagctatattttaactccacctttaacaggtgggttcaaagatgcttaagtagttttataaaaagctagtattgatgcatccggtagtcacattcatgtttaacttcagaacttattctcctccatggtactataacttaatgtctttttaatgcatgtctgatagagaaatatatgaaattagtaatattattatgcaaatattctccctaaatactgatttaaaaaacatataaccactgaaatttgcttctaaatgattcctgtgctcagtggttttactatgcaggcatcatacaaaatctaaattcatccatctcaccttccaagtttttgttaaagaaccacgaatatgtcaagatattattgaaaaggaaagaagttattttaattcagaatgctacattaatgcagcgtgccattatgccccctacaagccttttttgtacatcatatatcttttctgaactttgaatatcctttgaagttaaaaggtgtttcatggacagatgagatggatggctctgtggaaaagttaaaaattggggtgattattaattttgtctcaaattctcacacgatatttctaggagaaatctgatccaataacatagttctcataaagtggaagttcaatcagagcaagaaattgatcatgtacatgttcaatcactaaacttaaatcttgacagaaaaataatttagatttcacattttaaaaatggtatggcataccaagtataattctaagcttattccagcagccttgaatgcaataatttaatagcagatttacctagtaattggaactaaaaatagttaacatgctgtgttttcattttacttacacagggcaaattatttacatcacttgtcttcaattatgtaggctgacttcttagggcagagtggcttttcagaagctgcctctgggaataaaataaaccaaaagatattttttttttggaaactctctgttgtagaaccatacggcccatttcaaaatataaactatcacagtaacaaatatttggtgttattaagaaaaacaataatttttgtgatatcaacacccttaagaactataaactattgtgagtagtgccgcaataaacatatgtgtgcatgtgtctttatagcagcatgatttatattcctttgggtatacacccagtaatgggatggctgggtcaaatggtatttctagttctagatccctgaagaatcaccacactgtcttccacaatggttgaactagtttacagtcccaccaacagtgtaaaagtgttcctatttctccacatcctctccagcacctgttgtttcctgactttttgatgatcgccattctaacttgtgtgagatgatgtctcattgtggttttgatttgcatttctctgatggccaatgatgatgagcattttttcttgtgtctgttggctgcataaatgtcttcttttgagaagtgtctgttcatatccttcgctcactttttgacggtgcttacaatagcaaagacttggagccaacccaaatgtccatcaatgatagactggattaagaaaatgtggcacatatacaccgtggaatactatgcagccataaaaatgatgagttcatgtccttgtagggacatggatgaagctggaaaccaccattctcagcaaactatcacaaggacgaaaaaccaaacactgcatgttctcactcataggtgggaattgaacaatgagaacacttggacacaggaaggggaacatcacacgccagggcatgttgtggggtgggggaggggggagggatagcattagcattaggagatatacctaatgtaaatgacgagttaatgggtgcaacacaccaacatgacacatgtatacatatgtaacaaacctgcatgttgtgcacatataccctagaacttaaagtataatataaagaactattaactgtgtcttttatattccattgtcatctggaacttgtaggaatctgaagattaaacatattttacatagctgtaaagcagacagaatccttcagggctgttgttgaactcttgaaatcagaagctgagttttgagtggtgtgaagaaattaaacataacctgaaacaggagaaaacaatggtataaagataaactgtcctttctgttgcaccaatttttctatgggtctttcaaaaataaggaaagttatagagaagaacatagttgctacaaaattacagatcatacgagccagaaagaaattctgtgacttttcacttgcataaaccaatttaattttatttttccagaatgttaaaattcgaagtacttaaatctttacataaattagatcaacaataatgtgattatttcattgaaaaaatataaatacaaatgaattattgagcatttattaattctctgagaaagttaggagtctttttggtgataacatttaagtatggggttttctttggtttttacatattgatacaattactatttttgtccagttgatgaagtagctgatgtaagcacagttggattgaaaaaagagatgggattgagcaaagatgctggaacactcagataagttttttttttttttttggtcaagataataataaaaataaaattagattatatataatttgtgaaattataatcttttttagacagttaaaaatgggcacaaaacttctgccctccacactgcatacttgctttcagtttccaatgatgctgaaatttaaatctcactaatactttttcttaccaatttttacaataataaaatgttttatacaaagaatcttaataaattcttaaataattccatcaattttctaagaaatttatgtattagggttctctagagggacagaactaataggttgatgtatatataaagtggagtttattaaggagtatttactcacacaatcacaaggtgagctcccacaataggctgtctgcaatcttcagagcaaagaagccagtccgagtcacgaagttgaagaacctggagtctgatgatcgagggcaggaagcacgcagcatggaagaaagatacaggccagaagactaaaccagtctactattgccacattcttctgcctgcttttattctggccatgctggcaactgattagatgatgcccacccagattgagagtgggtctgcctttcccagtccactgactcagatgttaatctcctttggcaacaccctcacagacacacccagaaacaatactttgcacccttcaatcccatcaagttgacaccaaatattaaccatcacaagttaggataaatttgatgtcacattcctgtgtatgtatttctagagggggagtactagtctgactatagcttactggatgacaaccaaaaaaaaaattagtataataaagtggagattggagtaatagccattgactccaaggttgaagtattttgacagtgaatatgtagagtagacaagaatcaataatgaaagtggtgtgataggaatattagcatcaggaattagaagactatgaaaggcaaataataaatgtccgactgccaagctcagtttagcttattgattaatttgggggtatgtcagtctacatccttgttttgctggattaagtaatttgtacataaccacactatgtaagtattggatagaatacatgggcaccttgtacgtactattccaataacctacataggtttttactgacgggaaatttagagaagcacaatttatgaatgttgatagatgtggtgtccaccctgggattaatgataaccggaactgggatttaagagttataaactatacacactcatcccttaaacaacacaagtttgaacttcacagatccacttttatgcaaattttatttcacttccaccaaccaaatacagcaagatcattccatactcttctgtcttctcttcagcctactcaatgtgaagatgatgaggatgaagaactttatgaaaacctacttccacttaatgaaatatattttcctttcttatcattttcttaatattttctttcctctagcctcctttattgtaagaacatggtatataatatatttcacatacaaaacacgggttaatcaactgcacatcttattagtagagcttcttgacaatagtgagctattcgtagtttagttttgggggattcaaagttatacataagtatttgactgtggggaaatcagcactcctaacccccgtgttgttctagggtcaactatactcatatagtcaatcaactgagaaaggagagaaaaatttttaaaaaattgacaaaatgtaactaattgctgaagtggggtcatgagcaaatggaattttatctactatgaattaggctaatcttcccatttttgtgtatgtttcttttttttattattatactttaagttttagggtacatgtgcacattgtgcaggttagttacatatgtatacatgtgccatgctggtgcgctgcacccactaactcatcatctagcattaggtatatctcccaatgctatccctcccccctccccccaccccacaacagtccccagagtgtgatgttccccttcctgtgtccatgtgatctcattgttcaatttccacctatgagtgagaatatgcggtgtttggttttttgttcttgcgatagtttactgagaatgatggtttccaatttcacccatgtccctacaaaggacatgaactcatcattttttatggctaacaacccttcatgctaaaaactctcaataaattaggtattgatgggaagtatttcaaaataataagagctatctatgacaaacccacagccaatatcatactgaatgggcaaaaactggaagcattccctttgaaaactggcacaagacagggatgccctctctcaccactcctattcaacatagtgttggaagttctggccagggcaattaggtaggagaaggaaataaagggtattcaattaggaaaagaggaagtcaaattgtccctgtttgcagacaacatgattgtatatctagaaaaccccattgtctcagcccaaaatctccttaagctgataagcaacttcagcaaagtctcaggatacaaaatcaatgtacaaaaatcacaagcattcttatacaccaacaacagacaaacagagagccaaatcatgagtgaactcccattcacaattgcttcaaagagaataaaatacctaggaatccaacttacaagggatgtgtatgtttcaacagtgccagaatataggctaacttacaaaagattatatgaagaatgttttttgtagaacaaataaagactaaaaactttattcattttttttaattgcaataatatggctcagtttcaaataagcaaggaaaaagataaaacaaaaaaactaatgtgtggagatattaaattttattttacattttatactactctgagtagtatagaatagtatattatggggagattttatggaaaaaagataattaaatgggccttaaagaatatagcttattaaaaaaattatgagcaagatgagcaaataaaatataaaaatcaaagttttcaagtttaggatatgcttgcaatttgatcaaagtgtcaaatacctaataaaatactgagagaggaaaaaaacttggcatctgtaacccaaattctacattcacacttttccatcatttcctatatatctgacctcttctctgatattggcctctcattttgcttctcattcaaattttagcctttcaggatagcatgggactcgattgtccaggtcactgctttgttatttccaaacttgtcaacaaggcctttttaggatttcaagaatgttatgaagccagcttattgttggctctgccttttgtgaattcccacatgtatgaaaagacaggctctttcccagccattttgatatcagatacttaaatcaggggatttatggatcatttgtgaatttttaaaaagtggtttgcaaatatcactttcttagtagtaaaaccagctagaaatagaagacgacaatcaattttaaatgattctcttatatcaataattaaagcttatcctgaaaatggtaagtatcctcacatagtaagatgatcccaagtaataaaagctatcgactttaaaatgtaagcaagagaagcatgatgtaagacagattaatcatgaaggctgttaacaaaaaggagcaagtaggcttactcttcaacaggactctgattaggccacactgtaaaagaggcagcagaactattaaccagccacctttcagcatagctcctttcattttgcttgaacattacaactctttaaaaaggtcaacaagctaaataatggagattgtagaagaggctatgacaaaatatatttagataggatttgtctgtgcagacaagatgaaagaagcatttgcaatcagtgatttccaagtttgagaagtcatttgaggctctgggcaagtcctgtcttattttactttgatttaatacttgctcagggtcttctctctggagactgtggtgtgctttctctcaagtggcatgggaggacgggagaagctgtacatgttggggaacctttccaggtgtttgggatcagctcccagttttcagtgagaatcactccagagtatcaaattatggaattcttgggtccaaataaaatcaccgtccagtgtttcacttccttctaaatcttaaaagggttaagtcagggtattacactgaaaacattgatttatagtttcttctgaagttgagaatgatattatagcaaaggaataagtaaaatatagctataaaatcaccatatggaatacagattgtaaacacatgggatatttttaaacaaatcaatggaattaagagagggcagaagaatgtcaactgactgccagaaaaaatgaagccatagtctgaatatttggggaatgggaaattctgtttgggacagggcaataattctactggtgaaatcccagggaaattattgttgaagtgaaagcaggtaccaggtatggcaatagtgagaagtgagtcccaaaccataggaatcaatgggaaaattttaaatggggaattgatctcctttatttctcacctcaaccttccagaagataagaagctccatcagtaaaatagctaggtatctatccattcatcgaatctgccaccaaaacagcactgacaaacacatctctgatttaatttttaaaaataagttggcaaaaaaacataagcatattttaagaggtgatttaaaaaaaaactagaaagaacaaagaggggataatttaccttagtgttattagaaaaaatagagaaacaaacaaacaaaaaaagcttaattacatcctgaaaaagcttgatgataatgcatccatgaaccaaaataggaactgtttaacatgaagcaacgaaccgtagcaataaaggccactttgacttcactaaagccaacaataaaagaaagttgggagagatagccaagaaaatctagtttcagaaacaaaaacaaaacaaaacaacaaagagatgggaaataggcaataaaagaggaaaaaacatacggataaaatacggagactccatgccagacataaaagagttactaaaacagataattagaaaatagaggagggaaaaatagatgagggaagaataaatagagatttttttccattgcttaataagaacttatgccttgaattgaaatagcctgttaattatttaaaacaattacgggaacaacaacagaaagacctagtcatgataacattgtgaaattttcaactacttaagactgaaaaaagaggtgatggtattcagaaagtaaaccaaagacctataaatagtggtgataatcaaattggtatcagatataccatcagtaacaccagaggctaaaaaagggtaaatagtctaaagattcctggaaaaataactatatatctaaatttccatattcttccaaggaatcagtccagtgtgataatagaaaaaaaatccataggtgaaaattaacattttatgaagagaatgaaacaattaatactgaagaaagaaaacatgaaagtagaggatagaagtctcttggtgtgtcaatttcaactcagtgcttaagataaaagtgtctcggtaaaagtaaggcatggatggaaatggtatatagctaagcaccctgaaaatcttgaggacagattgaaggtatttgtgaggtataaaaagcagagatgcaacttaaacttgttgacagcaacattccccatgagtggcagagacataacattgaatttaaagtgtaacaagtaaaatcctctgctcaactttgagaaatattcatagccataggcatgtgagtattttctgttggtatgaatgtttttagactgatttcattaacgcattctagaaaacataaccgtggttttaaaacagaacacaaatcttaccaaacttgaggggggaaaatgagagcacaaccagctgtgtatgagagctataattaggggaagattgtaaaggaaaaggatggaaacatgtatgtctactttttagaaaaagataatccaagaggtactactttcagtagagtggacaatattgggctttaggcaggagaaaaccagtggggcaattgggtacatggatataatcatagggaaggattatgtatagaagagcaactgaggcacagagacaggaaggtgagaaatatctaacatattttgagggattttttgtcaaactatttagaatgttttcctggttaagatattaagcaatgttgggcataaaacatcagtcactcttttacagtcactctatttataaaataacgagtttcaagaagattaagtaacctgccacgttgatacagctaaaaagagatatgacttacatttgaatgtatttccactgcttacaaagccgcccacgcttaataaactgtgctgtactcctttcaccatgggtcatatcttcagcagaaagtgctgggacataaatcaagaacttctggttcccaaactgattcacttgccgccttatagttcacattctgaatcaactgctgttgtgttggtgacagtaaaagcacaaaagaacaatcaggcttaatttttttttaaagagtcccttcttggtatcaagactctggagtgtagcatgacaaaaaaatataccactgttgttataattatatgaaatcacaaaagtcaaagctgaccattattaacttcagtaaaaatttgacccacataatgaaatttccaagctttaggacaatatagatattagattgatccagaggaaataaattagacaacattttcttttaaaagtatatgtggcattaatgtggatttgtgaaataaacattatacctttgtattcatacaaagtcttgtataaataaatacatattttgttttaacttctgtagtcaacctcatatatttgtggaaatttatgacaatacatttcataaataattctgcttcattacttttaaattatcttttaaagatatatttttacaaacattgtctattattttcacattataatataacaaaatgaaaaaataggattgttcattttgtgatacctcggactctaagttgggcctgaactctatatgagaactgattaacaattaaatgtcaaaattttattttatttcattaacaaaatgtattatattgaaaattttataggaagcagtagccaaaagagtgcatatgttcatatgtgtagctgtttttcttcaagtacttttaaatctttatacgtcagttcctgaataccattggccttgctgataatacattgacagaattttccctgcaagtagcagatatacaattttttcgtaacttacttgtagcatatctatattcacataagggtttatggggataaagaaccaaaatatgggcatttttattatactaaaacattataacatgctatctaaaatggtcattttaaatttgtgctctaccttgcttttgcatgtatagtaacaaaaatcaggagaaagagagtaaaaattgtggtcacctaatgtttaatctataagattttatgtatatttctaaataagagaagtagattttttactaaaacaaagttacatgaagatttatagtgtgacataagactgaatttgaagtaaatactattattattattgcatgtaatctaatcttgaaactcatttgaataggaaggccagaaaaaatattaggatatgaaaacaaatcaactcaagagatttgaaatagcatttctggcttagtttattgatcagagaactggtaacagaattatggaaataatttcctgatcaatatttttggaatggagaaaccttgagaaagggttgttggtgaattaataattttgtttgggacacttacatttgaatttcctattggatagatacatcacaatgtcttcgtttttcaggcacccagtaagggagtctataaagaactaattttcccctacattggaaggtggtgacaggaaggtattttaatcagggctctggtggaatacaagacagaaataatttccagggagaaactcttttttcaaacaattcaggcagaagagggaatggcaagatgaaattttggattctacatgtgctcacctatcatttaattttcattaccaacaccaagtatacacatttttaaaaatgatgaagataacatttcaattatgttgtgtaaggatgaattaatcactacgtcatcatgcagaaagaactgatttaatcattaaaaacaaaacaattacaaactctatggtttctttcacaccaggaaacttagaaagcaacaagaacaagaaaaaggcagatgttataaaagcaaagctaaatactttgggtatatatacatgtaaaacctctgtgtaatggaatatattataaaaagtggtgaacaataagcaaccatatttcttaaatacttgtaatatatatgaaatataaagatttgaaaagaaaatatgtaaagatctcttataataaaagacagactttctaatatgtttattacactattcacactggcaaagacatgaaatcaacctgtgtacccatcaatggtggattgcaaaaagaaaatgtagtgcatatatgccatggaattccatgcagccataaaatagaccaaaattatgtctcgtgcagcaacatgaaggcagttggaagccattattctaagcgaattaatgcaagaagagaaaatcaaattttgcatttcttcacatataagtgggagcttaacactgagcgcatgtggacatgggaacaattaacactgtggactactacagtggggatggtaagggagaaagggggcagtggttgaaaaaccatctactgggttttatgcttactacttaagtgatgggatctgtacccaaacctcagcatcatgcaatgcacctatgtaacaaacttgcacatgcacctcaagtatctgaaataaaatttgaaattaaaaaaattgaaccattgttatgccagaaaacataaaagaaatactcatcaggaatagtatgttcaaatgtttgatctaatcagagatccaaggaaggcaaataaaataacgatgaaataaaacaacaaaataaattcctcctgtttgtttcgaaaatagattgtcccttcaacttgtggttaaagtttaaattggtacaaactttatgacgagaaattagctgaaaaatgcttacattgcactgaatcagccagtttgagagatcttagaaagccttggctaccagaatgataattacaatgtatgaaatgaaaaaaattgctaagcagttaacatttagtagaaagtcattgattaagtaatctattaagtgaaatacttataagtcattaaaattgcattagagatatagtgagcatctgttgtggctgctggaaccccatcaattctactatttctctactcatactaattagcctttgttatctactatcactgcccccgacataacacacatattagacagaatcctgaagaatcctgagtcctgataggaagtgtcaaggtgcccacccttctcttggatcttgaatggagcgcataatcacttttaacagtgagagctgatgaatcccaacagagaaacctggaatcaactgtttcttggtttctgttagttatattcttggagctaccccagtttctattttaaatatgaaaatgaaaatagcatttttagcttctctgtaagttctatcagcctgtctatctacataagattgtatacttgtttaaaggaccctactttggtttctgttgcttgcaaacagagagctaaaaaaaaaaaatctagatgtatttactgaaaaaagatggtcaccaaattttggtgactatattagtctgttctcatggtgctattcagacatacctgagactgggtagtttataaaggacagaggtttaattgactcatacttccacatggctggggaggcctcacaatcatggcagaaggtgaatgagtaccaaagtcatattttaaatggtggcagccaagagagcttgtgcaggggaactcccatttataaaaccatcagctctcatgagactttttaaacagcaggagaaaaacccacccctatgattcaattaacttccgctgagtccctcccacaacatgtgggaattatgggacctacaattcaaggtgagatttggttgggacacagccaaaccatatcgttccaaccctccccctcccaaatctcatgtcctcaaatttcaaaactactcatgccttcccaacagtccccaaaagtcttaactcatttcagcattaacttaaaagtccatagtccaaagtgtcatctgagaaaaggcaagttcttctgcctgtgagcctgtaatatcaaaagcaagttaattacttcctagatacaatgtgggtacaagcattgggtaaatacacctgttccaaatgggagacgttgtccaaaatgaaggtgcttcaggccccatgcaagtccaaaatccaacaggcctgtcaaatattaaagctatgaaatcatctcctttcactccatgtctcacatacaggtcacactgatgcaagacgtgggttcccatggtcttgggcagctctacccctgtggtttttcagcatacacccctccttctggatagtttcacaagctggcattgagtgtctgcagcttttctaggtacgtagtgcaagctgtcggtggagctatcattctgaggtctggcggatggtggccctcttctcacagctccattaggtagtgcccagtagggactctgtgggagggctccaaccccacattttccttttgcactgccttagcagaggttctcaatgaagaccctgcctctgcagcagacttctgcctggacatccagacatttccatacatcctctcaaatctaggtggaggttcccaaacatcaattcttgatttctgtgcacccacagactcaacactatgtggaaactgccaaggcttggggcttccaccctttgaagccatggcccgagctctaccttggcccttttagccatggctggagcagctggggcacggggcaccaagtacctaggctgcacggaacagtggggccctgggccaggcccaggaaattattttttcttcctaggcctttgagcctgtgatgggaaggtctgccacgaaagtctctgacctgccctggaaacagttttcccactgcttttgagattaacgtttggctcctcattacttatgcaaaggtctgcagccaccttgaatttctcctcagaaaaagggtttttcttttgtattgcatcttcaggctgcaaattttctggacttttatgctctgcttcccttttaaacataagttccaattccacaccaaagctttgtggatacataaaactgaatgattttatagtgaaaagcaaataatttgagaagatgtaagaaggtatgagtgctgtatgaaaagaagttttttcaacagaaaccaatgtgaaacttaggtaatagatatatgttttcatactgattttcttaattgacattttaatttggcccacccaaacatctggatagccaggctgtctgcttcttcaatggaagtaggtttcgttctctgtgtaaaagaagggtaccccattaccagtgtcctcccttccataatagctgaagagagtggctcacttagacatgttcaagagcaaccaaaatggcctcaggttgtggttggctccaatgtccctgccaggggtgctatctttactactaaccccagctgttactatttccccatttgacattgctgaatctcttctatctctatttcattctgtgccgttctctaggtgtaaacaggagttgtgcagatttaacaaaaggtaacactcttctttaatttttctgttgaagatctagatatagctaaagcttgattatgagctgcatgcacaacaattgacatattgcgtatcaaaacattttctaataaaatgtagatatatgatgttttgattaccgtagtttttgtttattatcagtgaattattttccttataaattgggactatatttatttttatagtcccaattatagtaagggattatagtaagaataactatattgttaatcttaagattgaaaagttgaagagtatattttaatatcatggcaaaactgaggaaacattttaaaaatccatttgaaacaaactgtgtactgcataaaacaaattatcgtgatgttgtaagatattactagaaaatgtataagtactttaataagccaaagcatgcgtgggtataagtatttactactgtgcaatgcattaccacacacttagaggtttagaacaaaacatcttaattatctcacagtttgtgtgtcagaattgcaggaataatatggcttggtcttctgctcagggtctcacaaggcagcatttaatgtattattagcaaggttgcatttctgtctgaagcttgaggtccccttccaagctcatatgattattggtcgaattctcttctagctactgtaggagtatggtctcacttttctgctgactgtcagctgggagatgcttttatttcccagaggccactcagaaattttttccatgtggctctttctcaggttctcttacagacctctgagaacatgacagattatttcttcaagactagcaaaagtctttctggctctactctgttaatatggggtcttacgtaagaatcacaggagtggctaccccatcacctttgccatattcttttggtaaaaacaagtcagagatttcactcaaacttatggggaaaaaaacttttcaagggtcaggacacataggggtcaccttgtatatgcccagcacaacaggttaccttataagtctttgttttaacatcttattagccttgcttttaagataaccaaattggggtgggactaacaaagactaatttattcatatgagattcagtcttgtggtttggccaagcctatcacaatgagcaaattaaatatgttcaggtcatttgaacacgtcattgtggagacatgcatgggaaatccaatttgatacaaagtcctatgtttagacagtggtcaaacttgtgaactatcttaatcaaatataataatattgacataatcctccctaaggtgaaaaaattattaaattattcagcaaatacttgatctgagtgtgtcataactaaatgtccttcgaaaaaagaaattttaaggtatttttggaagtagtttaaaaaaagataagattcaatcaatctaaactgagactagagagagattttggttaaaataatacaggatattcatatccattctatatttatatttccttgagctaaaaatcaattgagccaaaatcatcatgtttatttatatagaaaggatatgacataaaggcaaatataatttctaacctcatttcactttttcaaagagtaagcataaaatacacaaatagaacatacatttgaaaaagttaatatttaacatgaagtataacaatttttgaagtaggtattctgccttaaggactttttgtataaaataaaacctaatgactattgagatccacctgaagaatatgacagaggacaggttaaggtatcctcaaataaaaatgagagtttcttgtattaattttagtgcctataattcctctaatcaaagttgtatttgatggctttagcaaaaacaaaatgacttgactttcttctcatctttactatgtgattgccacttatgaatggaaaaatcttaattggtacttgcttacagagtttacttttacgttttaatttgtttagattatatagctcaaattcatcaattggacatatgaattgtcctgatttgtaattttttcctaaattttattctagtgtataaacacgtaaactgtcccacatgaatgtccttgtcatttttgtgctaaagatgcatttagaagtatcaagtaattgacatatgctcctttgaatacaggttagcacaaacgttttaatagaaaatgtaaagagtgaagtgatcactgaagggagcacttatagtatatatagctattaacagaaatagttgcttttatgatatatgtttttcattacaaaagatgattctttgatgactagtcaaatacaaatgaataaaaactcatgtttaagataaaccacaagtgtttagtcaccaacaaatgaaaaagacaaatatgtttaaattacacgtttaaatatttcatatttcataatattgaatgctgattttcttttagagatagtaaaaacaattcataaatgtctgaatcgctattcagtgtaaattggagaggtattgcatctttgcttgattgaaatgctgttatatgtggaaatacaaagtttgatatacttataaatggtaagtttcaataaagtctcaactcataatagctgataagaagtgtgcaaatgaggctgggtacggtggctcacgcctgtaatccgaacactctgggaagccaaggtgggtggatcatctgaggtcaggagttcgagactagcctggtcaacatggtgaaaccccatctttactaataatataaaaatgagccaggcatggtggcacatgcctatagtcccagctactcaggaggctgaggccacagaatcacttgaacccaggaggcagaggttgcaatgagctgagctcttgccattgcactccagcgtgggtgacaagagggaaactccatctcaaaaaaaataaaaaaaagaaaaagaaaaagaaaaaaaaagtgtgcaagtgaaatgacaaggctggacttcctacaaggaaacaaagatattcagtaaaagttttagttaggttccagacatctacataattacacaaaaatgcttgaagaaacagaagttcaatagacaaataatcattgtgaaggcaggggaagaattgcatgattagttatgaaagaaatgatttgaagaggaattagaaggattttaaaaggtatttccaagataaaatgtcaaaagcctcttatacattcaatacagcttttgtttcacttagggcagtggatataaggtgaccaaatgtctccattaacataggactaagggctttctcaagaatggtaaaagtaagaaaaatccatggccaaaacacgacaagctggtcaacctagcagtggttcttaccatttacccaaattatctgaggatgttttttgtacaagaaaaaaataaatttaaaacacacccaagctcctacaaatagattatatttgaactggtctgagatgaagtcaggtattgtattgtttgtatattagttttctattgctgtcataacagatttccaaaacgtagtggtttaaacacaaatgtattatctcattgttctgtagttcagacatctaggtgtaatgtggcttggctggtttctctggttagtctcacaggactgaaagccaggtgtcagcaagtagtatcctagaggctttggggatgaatccatttccttactcagtcaggttgctggtggaattcaattgcttgaagagggtaataggagtgagatccttgtgtccttggctagctgtaagctacagactgttcccaaatcctagagtccacccacattccctaggtggtgactgcttatccctcttcaaagctcatgatgccaagttgaacccttttcctgcatccaatctccatggtctgccctcccccggaccccactgcttcatctctcctactctttcatccacatcactctgattcttttccatcctctcctgcttgtttcaggcccatgtaattaccttgtgcccacctggataacctaagaccatcaccttattttaaggtgagctgattggtaacttattttcacctaaagtcttttttacagcagtacctagacgagtgtttgcttgaataaccaaaagatgggaattttggaaaacatccttagaattctgcctactccagtttgttctactatgggttctctgagtaattctaacttggcagccagatttgaaaagcatttttcaggcatgcattcttgctattgtgctacctgatcacacctacttccatatctctacaagcaccagatgttctcaatatgggaagaaataaatactctctctaggactttcaattttactgtgacatataaagaacttagaagttaaattagtttcctattgctggtataagaaattacaacaaacacagcgccttaaaacagtgtaaatttgtcttacatctctggagtcagaggttcaaaaatcagcctcacgaagctaaaaacaagtgtcaacggggtaaattccttcttcaagctttgaagggaagaatctattttcttgcccttttacctcctagtggctgcctatattatttggcttgtggacacttcttcacatcactttaacctatcacatccatcatcacacctactacagactctgaactcctgcctccctcttctaagatcctttgtgattacatcatactcacatgaataacccaatataatctctgcatctcaagattcttaacttaatcagatattaaaagagcctctgccatataacattcagagtttccaggagttacgacatgaacatctttgaggggtaatttttaagtctacgataaacatgagcatctttacaaaaagaacaagtagatgaattttaagacacaaaattttaaatccttcagataaatgaggttgtagagcagaatgctgtgccaaaatctggagacacaggtgcatccatggagtcatagtcgagatcagcttactgaagcaaatcactgagccataaactgatagaagtatttcaacactaatttttatcaattgatggaaactgagtgtggtccactgtgagaaattcccagaggccacagtttcaacccttggtgggcatcatctctagtaacatcaacaatttatcactgagaaggtctaagaaagatgccattgttgactcctgctggtgagggaaattaattgtgaaacatgcctagaggcttctctctaacaaacgtctattctctatggaaaaagacttctccagtgtctttttcaagcagagggaaaggcattcttcccaatctagtccccgctaggcttcctacatcacctgtgggtgaaaatgtaaacaaacgctagggctgactgcacagaaagccaaccactgagattatgagtattgccaggaaagatggctttattatgggtaacgtcagctcgagagatgggaggcaagacccaaattatcctttctttaactactaatgtttgggatttacagagtgggggaggaaaactagagaggcaaggaagaggagttggtcaaagacagcaggtggtccaatgaggggtttagcatcttattgtagccacatatgaaaaaacaggaattaatgaggggtaaggaagagggcagcaggcagcagatagatctcttttttctttttcgagacagagtctcactctgtcgcccaggctggagtgcagtggcatgatcccggctcactgcaatctccgcctcctgagttcaagcgattctcctgcctcagcctccagagtatctgggattacaggtccccgccaccatgcctggctaatttttgtatttttggtagagatgggttttgaccatgttggctaggctaatctgaagctcttgacctcatgtgatctgcccaccttggcctcccaaagtgcttggattacaggcatgagccactgccccctgggccagatgtatctcattgtacataagtaagtttctcaagcttcagttttttgggtgtcaggcatgtaggaatattgggccagtgtcaaaaaacaatagtgaaaaggagtcagagcttcaaggaaatagatcgggaatactgaacaaatgaggggactagggagaagggagatttaaaaaaatgtattctcaagatacatgcccattcaactactgaagatttagaattaagatggcctcattcctccccgacaatttgtcaccaaagcaatgcagtgtaataactaaggattgaagcttaaagagctgcaagacatgtattgtcactgaggagtacttagggaagccaaaaatcaataagagactaaaataaaaacattagaaaactgtaaaccactggcacctatagctacaacaaaacttaaactagcccatctctagcaagatttacatcaatactaatataaaaagcctatttacctcagttaatattacaggtaaaaaatgtcaagcattcaacacaaattagatggaatgccaaaggcaagaaaaaatatccttgggggaaataatacaattaacagaacaagactatgatatgatacagatataattatcagatgagggatttaaaataacaataatcaatgtgctgaaggctttagtgaaaagtaaaagaaacaagttcaagatcatatgggtaatgaaaacagagagatggaaactgtaagaaagaataaaaagaaaatgctagaaataaaaaacatcccgacgaaaatgaagaatcccttctattgctcaacaatagatttgacaaaattgaggaatgattcagtgggcttgaaattacaatacaattttgtaaagtaaaatttaaagacagaaagaataataatgtaagagagaactcaacatccacgaacatgggatgatttcaaaaggtgtttcataaacagaattggattatcagaaccagaagaaagagacaggaagacatattccaagttgtaatgtatgaaaactttccaaaattatttacagataaaatcctatcaaatccaggaagttgaaagaataacaagcaatataaacaccaaatttttgatttataacaataatattactataacaataatattataacaataatattacaaaatttatcaaattgattttcataagtcaagcattgccctaagtacttttatttttaatttttgttttgtgtttgggggtacatgtgcaggtttgttatattggtaaactgtgtgttgcaggagcttggtgtacggattattttgtcacccaggtaatatgcatagcacccgataggtagtttttggatactcaccctcctcccaaccttcactctctagtagaccccagtgtctgttgtttgcttctttgtgtccatatgtactcaatgtttagctctcacttaccagagagaacatgcagtgtttggttttctgtttctatgttaattcacttaggataatgacctccagctacatccttgttgctgtaaaggacattatcttgtttttttttttttgttttttttgttttttttttttttatggctgcatagtattgcatggtatacatgtaccaaatttttaaaatccagtctattgctgatgggtatttacattgatttcatgtatttgctattgtaaatagtgctgcaatgaacatatgtggtgattgtagacatcaattcaacgctattcatattaaactaccttttggttttcatcaggatgaataccatcttgatggtagaacaatttatattcctttgggtatatacccaatacagggatggctgagtcaaatggtaactctgttttaagttctctgataaatttgccaaactgctttccacagtggctgaactaatactcattccaaccagccgtgtataagcattccctcttctctgttccagcatctgttctttttttaactttattcaataacagccattcttattggtgtgaatggtatcacattgtggttctgatttgtatttctctaatgattagtgatgttgaacgtttctttagatgttttgtggccacacacattttcttttgaaaagtgttagtgtcctctgcccactttttgctgtggtggtttggtttttgcttgtaaatttgttccagttccttatagattctggatattaaacttttgtcacatgcatagtttgcaagtattttctcccatttgtaggttttctatttattctattgatttttttttctgctttgcagttctttagcttaattaggtcccatttgtcaatttttctttttgttacagttacttttggtgttttcattataaagtttttgccagggcctatgtccagaatggttttatctagtttatcttccaaggcttttataattttaggttttaaacttacgtctttaattcatcttaagtttacgtttgtatattgtgtaaggtaggaaggaaggaaggaaggggtccagtttccatcttctgcatatggctagccagttatcccaacaacatttattaaataggaagtcctttcctcattgcttacttttgccaactttgtggaagatcaaatggttgtaagtgtgtggccttatttctaagctctctattgtgttctactggcctatctgcctgtctttgtaccagtaccatgctgttttggttattataaccttatagtatagtttgaagttgggagatgtgatgcctccagctttgttttgttctttgtttttgttttttggcttaggattgctttggctatttgggctcttttgtggactcatatgaaatttagtatagttttttcgaattatgtgaagaatgtcattggtagtttgatatgaatagcattaaattataaattgcttttggcagtatggccattttaacaataatgaatcttcctattaacatatatgaactgtttttccctttgtttcagtcatctccaatttctttgcacagtattttgtaatcctcattgtagagatctttcacctcctttgttagctgtattcttaggtatttaattattttgtggctattgtgaatgaaattgtgtcttgacttggctttaagcttgtacattgtttgctgttgaaaatgctactgatatttgtgcattaattttgtatcctgaaacttcactgaagttgtttatgagatcaaggatctttagggcagagattatggggttttctcagtatagaaacaaataatcagtgaaaagagataatgtgactttctatcttcctatttgcatgccttttattactttcccttgcctgatttctctgactagtacttctagtactatgatgaatagaagtagtaagagtcagtatcttttctttttccagttcttaaggagaattattccagcttttgcccatatagtatgatgttggctgtaagtttgtcacagatggctcttattattttgaggtgtgttccttcaatacttagtcagttgacagtttttaacataaaggataaattttactgaaaacctttccttagtctattgagatgatcatgtagtttttgttttcactttttttaatgtgatgaataatatttattgatttgtgtgttgaatcaacctcacatcttattaataaagtctacttgattgtgatgaattagctttttcatttgctgctggattcagtttactagaattctgttgagtatgtttgtatctatgttcttcaaggatattggcctgaaattttccttttttgtgtgtttgtctctgctaggttttggtataagaatgatgctgacctcaccaaatgacttcaggaggattcccccctagtcaagtttttggaatactttcaatattaatggtatcaattcttctttatacatgtggtagaatttggctgtgaatttatctggtcttgtgctttttctggttggtaacttttttttttattatgtattccatttgggaactcattattggtttgttcaggaattcaatttcttcccttttctatcttggggagttgtatgtttcattaagttatcatctatttctttcaggttttctagattgtgtgcatagaggtgttcatagtaatcagtagtctctcagtttttggtttttttttttttttttgtatttctgtggggttggtggtaatgtcccctttgtcatttctgattgtgtttatttggatctttctatttttcattagtctaggtagcagcctatcaatcttatttatctttcaaaaaataaattcataggttcattgatcttttctatagtttttcacattttagttcagctctaattttttttctctccttctgatagctttgaggttggtttgctcttgtttctctagttctccaagtgtcatattatgttgcaagtttgtctttctaatttttcaatgtggctgtttagtgctataaacttctgtcttcacattactttagctgtgtcccagaggttgcgatatgttgtatttttgttctcattagttccaaataatttattgattgctgtcttaatttttttgttgacccgaaagtcactaaggcaaggctgtttaatttccatataattgtattgttttgagtgatgctttcattattgatacccattattattgcactgtggtctgagagtgtggctggtatgtttttagtttttaaaagtttgctgataattgtttaatgaccaattatgtggataattttatagtatgtgccatatacagatgagaagaatctatattctgttggttttgggtggagagttctgtagatgtcagttagcttcatttggtcaggtgtcaaactcaggtcctgaatattttttttatctttctgcctctctatcctgtctattactctttgtaagttattgaagtctcccactattattgtgtggtcttctaagtctctttgcaggtctctaagaatttgttttatgaatctaggttctacagtgttggatgcatgtacatttaggatagctaggtcttcttgttgaattgaaccctttaccattatgaaatgttctcctttgttctttctgataattattggtttaaagcctggtttgtctgaaataagaatagcaacttttgctcttgatggttttccatttgcttatgagacctgtctccatccctttactttgaacccatgggtatcattgcatgtgagatggatctcttaaagacatcacacagttggttcttgctttatccaactttccactctgtgccttttaattgaggcatctatcccatttacattcaagtttaatattgatatttgtggatttgatcatgtcttcatattgttagctatttattatgcagacttgattgtatagttgttttataatgccaatggtctatgtacttaaactgtattttgtgttgtcccggaacggtctttcctttttatatttagtacacccttaaggacctcctgtaagacaggtctggtactaacaaattcgcttagcatttgcttatctgaaaagaatctcatttctccttcacttatgaaacttagtttgactggaaatgaaattcttggttggaatttcttttccttaagaatgctaaaagtagacccacaaactcttctggcttgtagggtttctgctgaaaattctgctgttagcctgatggagttccttttgtaggtgacctgcctgtttctctagctgcatttaacatttttttcttacatttcaatgttggagaacctgatgactatgtgtcttgggtatggtcatcttgtgtagtatctcacaggggtcctctgcatatcctgaatttgagtgttagtcttctagtgtggttggggacatttttacaaactttatcggcaaatatgttttccaagttgcttgcattctctccctctgcttcaggaatgccaatgagtcatagattttaatctctttatatagtgtcgtatttctcagaggtattcttcatttttcttttttttctgtttttttctgactgagttgttttggagaagtctttaatctctgatattctgtcatcaacttggttaattctactgttaattcttgcaattgtattataaaatttgaagtgagtttttcagctccatcaaatcagtttagttccttctcaaaatgcccattacttctttcagcttctttattattctgttgtattcttatagtccttggattggattttgactgtttattaaatcttgacgatcatcattcctatccagattttgaattctctgtctgtcatttcagccattttagcctggttaagaatcattgctggggaaataatgtgggtatttggaggaaaaaaagacactctggctatttgagctgtcgttgttcttgtgctggttctttctcatatccgtgtgctgaagtttcttcagtctttgcagatgctatcctttggataagttttttgcttttatcttatttgatgctgttgggggttttatggtggtataaagtgggttacagtcttcatttctggaagattctagtgggtcaaggctcggctcagcactccttggttgtgtgttccaactatcgggagctggtactgagctctggctttgttttctggacccccaaggttagaaatctgctatgctataggggccaaggtgttcctagtctactggccccaacactcaatcagtggtgcgggtgttggcataacttatgtatttggtgcagaaatgtttacctaggaaaataagcctataaattagtaaacaattttacattttcctaagaaattttttcaaagccatattatttttcctcaagtaaagagttagataatttaggcaagcaagtctcccctcaggcaatagattgctaacctgtccaaacagcttgcttattttacaacagtttacttatcaaggccattatctaactgtgtccaccaatcttaattatgtcaccatctttgcacaaacctaattatcttctttctttgaatgaacagaaataatctgcagtatcacaggtgtaggcatcttgtaaataccctcctctgtccattccgttctgaaatgctgcagactcaagactcttcttttcagtaagaataatttacttacctttctttggtgaacagttttctttgttattgttgatcttttgatggtaccagcggtcaaaacttattttatagcagatatagaactaagttataatccatgctttgactcaaagatctcaacagtcttcagtcatcttattgaatgcatcttattaaaatacatctccactgtttatttttctcatggagatgagcttccttaaaaactcacccacttctatgcaacagaataattcatcttaatctctagtttttaccattcttcgaactctagtcctgcattttctactgcctgcaggacttttccacttgactgcatttctatcatctgacaccatttaactgacactatttaaactaaactcatctatgccaaaaatgtaattctctggacttcattattatacaaaaatttggcagacgttttaaaaatcttatgcacacatttcttgtcaccctattaacattgtaaatgtcctgaggaaaaggatctcataagatacttctcaatattatctttctcttctgctaagcacaatgcagtgcatgaggtgttcagtaaagagagaaaaagtgaaaaatgagagagctgtaagtcattttaattactacataaaattaggtttggcatgatatttaaaattacaatttaatttgattcaatggtcatgagctagtgtcatcaggactgctcaaaaaaccccaggggtacttataatgaataattatcataccctgacccctaggcaggctgttcttaggttgtgagtgtcatgaaatgaaccctggaggtgatattagggaaaagagaaaaaatgaagacagcttttttctttctctcactagaatagtctgctgacaacaggcaattaaagttcaaggatatttgagagaggaagcccattttaaatatggaagagaaagttgagtgatagaagggttagataaattgagtccagcagtacaacctcaagaataagttctgaaaggaaatccttgtaaactgtttggttttcttttatagaatcacctaagttggtcaccatagagatgacacaagcaaagacagtcctctcttcctctaagcttgcaaatgcctttgtaagaatggacaccagcaaattccacccccaaaaagagagatataatagaaacagagcaatattgtcaaacaccaggacttctgatctatgtcccagcagtagtggtaaaaatgaatcaagacaacaaatgtaattttttttctttcttcctataatataattgtagataaacatgagaagtcatatattattaggtcagggttaagtaaaaatgatgcagcattcattttcattcaatttaattcaacaaatacttagtaaaagtcatgtggtagatactctaccaatattgtggatacacaaaaggagttaatacataacctattccctcaagaagatgcatttatttgtagttagaagccccagtactatgtggaaattctatatacttttattccattcctctttctactctcttaggtcatttcacactttctcattattattaaacttctcaaaaatcattctgacaagataactcataagtttctcagaacagaaaatatataacaaaatgaatgtgtgaatgaagtaaaataatttcaatatttctgtgtaatgcaaaaaatcaaaaaaacaaagttctctggttttcacttaatttgtttggcaaatagctcttattctcatagcttattcatttttacagaaatattgccataattctggttgctcttttacactaaccatcacagaggtaaatgaaaaaacttttcttgtgtaatttcagaaggtaatgccttttaatgtaactctatattttaacattttgattttagaacagagctttagtgttgataaggcataattatatacatgtattaataattacacacatgtagaggtattatatataatggaaattgaatatactctacataaaaataaaattataagcaaatgaacattattgaaatgcattattagtaaaactgatgctgtaggtaaaactaattataattaaaatcaaaatatttactaaacctacttactcctataatttgcgttgctggttaaaacccagctataaaaattttgatcaaaaatttttattttgtaaatgatctgacacagcataaatgttaatcacatttctttattttatttgcagattaatttgagtaatttgaaaaattattaatgttacttaattactctcaacaccttacagtgtctcctgtaagcactattggtgatactgaatttaagttacatttaacaactatcagaaaatagtttttaaagtaaaaattatgatttggagtttaccaactaaatcttgttagctttcactgcctctattgagaagagcagcagttcttatcttcctcctttttcttctttaattaacaagagattatttgtatcatagccataaaatcagttcaggtcttacatgaacgacacccctgactgcaatggtgtagtttattgtattagtccattttcatgctgctgataaagacatacataagactgggtaatttataaagaaatagaagtttaacggactcacagttccatgtggctggggaagcctcacaatcatgatcgaaggcaaaaggcacatcttacatggcaacaggcaagagagaatgagagccaagtgaaaggagaaaccccttataaaaccttcagacctcatgagacttattcactaccacaagaacagtatgtgagaaacagtcccatgatccagttatctcccactgggtccctcccaccacacaagggaattatgggaactgcaattcaagatgaaatgtgggtggaagcacaacggaactatatcattgatcaaagcattattgttttctctgataaactgatctagaaagtgctgcttgtgatcagctttggtgaccatgatcagtgaaatggttaaggaaatctacagattttgtaggtttgtgccttgacagacgaccggtatctgtttctcttttcatgatgaagtatctaacaaagctctgtccaaaattttgaatttctcgttaaatgcatcatgattatagaacagaggttacaatcaattattcagtcacacaat
